United States Patent Application Publication US 2025/0361525 A1 - sequence listing, part 2

SEQ ID NO: 6949 - DNA, 227 bp, synthetic construct; identical to SEQ ID NO: 6948
  misc_feature 1..227: note = promoter
  source 1..227: mol_type = other DNA

SEQ ID NO: 6950 - DNA, 227 bp, synthetic construct
  misc_feature 1..227: note = promoter
  source 1..227: mol_type = other DNA
gagggcctatttcccatggttccttcatattcatagaggatgcaagactgtcagagggacgattgcaattaacttggccataaacacaaacctattggcacaaactatgtgatatagaaagttatgattgttcaagaagtttgtaatttaaaaaaaggaccactatgtacttaccgtaactgaaaagtctttcgttttctcaactttatatatcttccggaaaggac

SEQ ID NO: 6951 - DNA, 227 bp, synthetic construct
  misc_feature 1..227: note = promoter
  source 1..227: mol_type = other DNA
gagggcctatttcccatggttccttcatatttatagaggatgcaagactgtcagagggacgattgcaattaacttggccataaacacaaacctattggcacaaactatgtgatatagaaagttatgattgttcaagaagtttgtaatttaaaaaaaggaccactatgtacttaccgtaactgaaaagtctttcgttttctcaactttatatatcttccggaaaggac

SEQ ID NO: 6952 - DNA, 227 bp, synthetic construct
  misc_feature 1..227: note = promoter
  source 1..227: mol_type = other DNA
gagggcctatttcccatggttccttcatatttgtagaggatgcaagactgtcagagggacgattgcaattaacttggccataaacacaaacctattggcacaaactatgtgatatagaaagttatgattgttcaagaagtttgtaatttaaaaaaaggaccactatgtacttaccgtaactgaaaagtctttcgttttctcaactttatatatcttccggaaaggac

SEQ ID NO: 6953 - DNA, 227 bp, synthetic construct
  misc_feature 1..227: note = promoter
  source 1..227: mol_type = other DNA
gagggcctatttcccatggttccttcatatttgcagaggatgcaagactgtcagagggacgattgcaattaacttggccataaacacaaacctattggcacaaactatgtgatatagaaagttatgattgttcaagaagtttgtaatttaaaaaaaggaccactatgtacttaccgtaactgaaaagtctttcgttttctcaactttatatatcttccggaaaggac

SEQ ID NO: 6954 - DNA, 227 bp, synthetic construct; identical to SEQ ID NO: 6953
  misc_feature 1..227: note = promoter
  source 1..227: mol_type = other DNA

SEQ ID NO: 6955 - DNA, 227 bp, synthetic construct
  misc_feature 1..227: note = promoter
  source 1..227: mol_type = other DNA
gagggcctatttcccatggttccttcatatttgcataggatgcaagactgtcagagggacgattgcaattaacttggccataaacacaaacctattggcacaaactatgtgatatagaaagttatgattgttcaagaagtttgtaatttaaaaaaaggaccactatgtacttaccgtaactgaaaagtctttcgttttctcaactttatatatcttccggaaaggac

SEQ ID NO: 6956 - DNA, 227 bp, synthetic construct; identical to SEQ ID NO: 6955
  misc_feature 1..227: note = promoter
  source 1..227: mol_type = other DNA

SEQ ID NO: 6957 - DNA, 227 bp, synthetic construct; identical to SEQ ID NO: 6955
  misc_feature 1..227: note = promoter
  source 1..227: mol_type = other DNA

SEQ ID NO: 6958 - DNA, 227 bp, synthetic construct
  misc_feature 1..227: note = promoter
  source 1..227: mol_type = other DNA
gagggcctatttcccatggttccttcatatttgcatagaatgcaagactgtcagagggacgattgcaattaacttggccataaacacaaacctattggcacaaactatgtgatatagaaagttatgattgttcaagaagtttgtaatttaaaaaaaggaccactatgtacttaccgtaactgaaaagtctttcgttttctcaactttatatatcttccggaaaggac

SEQ ID NO: 6959 - DNA, 227 bp, synthetic construct
  misc_feature 1..227: note = promoter
  source 1..227: mol_type = other DNA
gagggcctatttcccatggttccttcatatttgcatagagtgcaagactgtcagagggacgattgcaattaacttggccataaacacaaacctattggcacaaactatgtgatatagaaagttatgattgttcaagaagtttgtaatttaaaaaaaggaccactatgtacttaccgtaactgaaaagtctttcgttttctcaactttatatatcttccggaaaggac

SEQ ID NO: 6960 - DNA, 227 bp, synthetic construct
  misc_feature 1..227: note = promoter
  source 1..227: mol_type = other DNA
gagggcctatttcccatggttccttcatatttgcatagagggcaagactgtcagagggacgattgcaattaacttggccataaacacaaacctattggcacaaactatgtgatatagaaagttatgattgttcaagaagtttgtaatttaaaaaaaggaccactatgtacttaccgtaactgaaaagtctttcgttttctcaactttatatatcttccggaaaggac

SEQ ID NO: 6961 - DNA, 227 bp, synthetic construct
  misc_feature 1..227: note = promoter
  source 1..227: mol_type = other DNA
gagggcctatttcccatggttccttcatatttgcatagaggacaagactgtcagagggacgattgcaattaacttggccataaacacaaacctattggcacaaactatgtgatatagaaagttatgattgttcaagaagtttgtaatttaaaaaaaggaccactatgtacttaccgtaactgaaaagtctttcgttttctcaactttatatatcttccggaaaggac

SEQ ID NO: 6962 - DNA, 227 bp, synthetic construct
  misc_feature 1..227: note = promoter
  source 1..227: mol_type = other DNA
gagggcctatttcccatggttccttcatatttgcatagaggataagactgtcagagggacgattgcaattaacttggccataaacacaaacctattggcacaaactatgtgatatagaaagttatgattgttcaagaagtttgtaatttaaaaaaaggaccactatgtacttaccgtaactgaaaagtctttcgttttctcaactttatatatcttccggaaaggac

SEQ ID NO: 6963 - DNA, 227 bp, synthetic construct
  misc_feature 1..227: note = promoter
  source 1..227: mol_type = other DNA
gagggcctatttcccatggttccttcatatttgcatagaggatgagactgtcagagggacgattgcaattaacttggccataaacacaaacctattggcacaaactatgtgatatagaaagttatgattgttcaagaagtttgtaatttaaaaaaaggaccactatgtacttaccgtaactgaaaagtctttcgttttctcaactttatatatcttccggaaaggac

SEQ ID NO: 6964 - DNA, 227 bp, synthetic construct
  misc_feature 1..227: note = promoter
  source 1..227: mol_type = other DNA
gagggcctatttcccatggttccttcatatttgcatagaggatgcgactgtcagagggacgattgcaattaacttggccataaacacaaacctattggcacaaactatgtgatatagaaagttatgattgttcaagaagtttgtaatttaaaaaaaggaccactatgtacttaccgtaactgaaaagtctttcgttttctcaactttatatatcttccggaaaggac

SEQ ID NO: 6965 - DNA, 227 bp, synthetic construct
  misc_feature 1..227: note = promoter
  source 1..227: mol_type = other DNA
gagggcctatttcccatggttccttcatatttgcatagaggatgcaactgtcagagggacgattgcaattaacttggccataaacacaaacctattggcacaaactatgtgatatagaaagttatgattgttcaagaagtttgtaatttaaaaaaaggaccactatgtacttaccgtaactgaaaagtctttcgttttctcaactttatatatcttccggaaaggac

SEQ ID NO: 6966 - DNA, 227 bp, synthetic construct; identical to SEQ ID NO: 6965
  misc_feature 1..227: note = promoter
  source 1..227: mol_type = other DNA

SEQ ID NO: 6967 - DNA, 227 bp, synthetic construct
  misc_feature 1..227: note = promoter
  source 1..227: mol_type = other DNA
gagggcctatttcccatggttccttcatatttgcatagaggatgcaagtgtcagagggacgattgcaattaacttggccataaacacaaacctattggcacaaactatgtgatatagaaagttatgattgttcaagaagtttgtaatttaaaaaaaggaccactatgtacttaccgtaactgaaaagtctttcgttttctcaactttatatatcttccggaaaggac

SEQ ID NO: 6968 - DNA, 227 bp, synthetic construct
  misc_feature 1..227: note = promoter
  source 1..227: mol_type = other DNA
gagggcctatttcccatggttccttcatatttgcatagaggatgcaagagtcagagggacgattgcaattaacttggccataaacacaaacctattggcacaaactatgtgatatagaaagttatgattgttcaagaagtttgtaatttaaaaaaaggaccactatgtacttaccgtaactgaaaagtctttcgttttctcaactttatatatcttccggaaaggac

SEQ ID NO: 6969 - DNA, 227 bp, synthetic construct
  misc_feature 1..227: note = promoter
  source 1..227: mol_type = other DNA
gagggcctatttcccatggttccttcatatttgcatagaggatgcaagactcagagggacgattgcaattaacttggccataaacacaaacctattggcacaaactatgtgatatagaaagttatgattgttcaagaagtttgtaatttaaaaaaaggaccactatgtacttaccgtaactgaaaagtctttcgttttctcaactttatatatcttccggaaaggac

SEQ ID NO: 6970 - DNA, 227 bp, synthetic construct; identical to SEQ ID NO: 6969
  misc_feature 1..227: note = promoter
  source 1..227: mol_type = other DNA

SEQ ID NO: 6971 - DNA, 227 bp, synthetic construct
  misc_feature 1..227: note = promoter
  source 1..227: mol_type = other DNA
gagggcctatttcccatggttccttcatatttgcatagaggatgcaagactgagagggacgattgcaattaacttggccataaacacaaacctattggcacaaactatgtgatatagaaagttatgattgttcaagaagtttgtaatttaaaaaaaggaccactatgtacttaccgtaactgaaaagtctttcgttttctcaactttatatatcttccggaaaggac

SEQ ID NO: 6972 - DNA, 227 bp, synthetic construct
  misc_feature 1..227: note = promoter
  source 1..227: mol_type = other DNA
gagggcctatttcccatggttccttcatatttgcatagaggatgcaagactgtgagggacgattgcaattaacttggccataaacacaaacctattggcacaaactatgtgatatagaaagttatgattgttcaagaagtttgtaatttaaaaaaaggaccactatgtacttaccgtaactgaaaagtctttcgttttctcaactttatatatcttccggaaaggac

SEQ ID NO: 6973 - DNA, 227 bp, synthetic construct
  misc_feature 1..227: note = promoter
  source 1..227: mol_type = other DNA
gagggcctatttcccatggttccttcatatttgcatagaggatgcaagactgtcagggacgattgcaattaacttggccataaacacaaacctattggcacaaactatgtgatatagaaagttatgattgttcaagaagtttgtaatttaaaaaaaggaccactatgtacttaccgtaactgaaaagtctttcgttttctcaactttatatatcttccggaaaggac

SEQ ID NO: 6974 - DNA, 227 bp, synthetic construct; identical to SEQ ID NO: 6973
  misc_feature 1..227: note = promoter
  source 1..227: mol_type = other DNA

SEQ ID NO: 6975 - DNA, 227 bp, synthetic construct; identical to SEQ ID NO: 6973
  misc_feature 1..227: note = promoter
  source 1..227: mol_type = other DNA

SEQ ID NO: 6976 - DNA, 227 bp, synthetic construct
  misc_feature 1..227: note = promoter
  source 1..227: mol_type = other DNA
gagggcctatttcccatggttccttcatatttgcatagaggatgcaagactgtcagagacgattgcaattaacttggccataaacacaaacctattggcacaaactatgtgatatagaaagttatgattgttcaagaagtttgtaatttaaaaaaaggaccactatgtacttaccgtaactgaaaagtctttcgttttctcaactttatatatcttccggaaaggac

SEQ ID NO: 6977 - DNA, 227 bp, synthetic construct; identical to SEQ ID NO: 6976
  misc_feature 1..227: note = promoter
  source 1..227: mol_type = other DNA

SEQ ID NO: 6978 - DNA, 227 bp, synthetic construct
  misc_feature 1..227: note = promoter
  source 1..227: mol_type = other DNA
gagggcctatttcccatggttccttcatatttgcatagaggatgcaagactgtcagaggcgattgcaattaacttggccataaacacaaacctattggcacaaactatgtgatatagaaagttatgattgttcaagaagtttgtaatttaaaaaaaggaccactatgtacttaccgtaactgaaaagtctttcgttttctcaactttatatatcttccggaaaggac

SEQ ID NO: 6979 - DNA, 227 bp, synthetic construct
  misc_feature 1..227: note = promoter
  source 1..227: mol_type = other DNA
gagggcctatttcccatggttccttcatatttgcatagaggatgcaagactgtcagaggggattgcaattaacttggccataaacacaaacctattggcacaaactatgtgatatagaaagttatgattgttcaagaagtttgtaatttaaaaaaaggaccactatgtacttaccgtaactgaaaagtctttcgttttctcaactttatatatcttccggaaaggac

SEQ ID NO: 6980 - DNA, 227 bp, synthetic construct
  misc_feature 1..227: note = promoter
  source 1..227: mol_type = other DNA
gagggcctatttcccatggttccttcatatttgcatagaggatgcaagactgtcagagggaattgcaattaacttggccataaacacaaacctattggcacaaactatgtgatatagaaagttatgattgttcaagaagtttgtaatttaaaaaaaggaccactatgtacttaccgtaactgaaaagtctttcgttttctcaactttatatatcttccggaaaggac

SEQ ID NO: 6981 - DNA, 227 bp, synthetic construct
  misc_feature 1..227: note = promoter
  source 1..227: mol_type = other DNA
gagggcctatttcccatggttccttcatatttgcatagaggatgcaagactgtcagagggacttgcaattaacttggccataaacacaaacctattggcacaaactatgtgatatagaaagttatgattgttcaagaagtttgtaatttaaaaaaaggaccactatgtacttaccgtaactgaaaagtctttcgttttctcaactttatatatcttccggaaaggac

SEQ ID NO: 6982 - DNA, 227 bp, synthetic construct
  misc_feature 1..227: note = promoter
  source 1..227: mol_type = other DNA
gagggcctatttcccatggttccttcatatttgcatagaggatgcaagactgtcagagggacgtgcaattaacttggccataaacacaaacctattggcacaaactatgtgatatagaaagttatgattgttcaagaagtttgtaatttaaaaaaaggaccactatgtacttaccgtaactgaaaagtctttcgttttctcaactttatatatcttccggaaaggac

SEQ ID NO: 6983 - DNA, 227 bp, synthetic construct
  misc_feature 1..227: note = promoter
  source 1..227: mol_type = other DNA
gagggcctatttcccatggttccttcatatttgcatagaggatgcaagactgtcagagggacgagcaattaacttggccataaacacaaacctattggcacaaactatgtgatatagaaagttatgattgttcaagaagtttgtaatttaaaaaaaggaccactatgtacttaccgtaactgaaaagtctttcgttttctcaactttatatatcttccggaaaggac

SEQ ID NO: 6984 - DNA, 227 bp, synthetic construct
  misc_feature 1..227: note = promoter
  source 1..227: mol_type = other DNA
gagggcctatttcccatggttccttcatatttgcatagaggatgcaagactgtcagagggacgatcaattaacttggccataaacacaaacctattggcacaaactatgtgatatagaaagttatgattgttcaagaagtttgtaatttaaaaaaaggaccactatgtacttaccgtaactgaaaagtctttcgttttctcaactttatatatcttccggaaaggac

SEQ ID NO: 6985 - DNA, 227 bp, synthetic construct
  misc_feature 1..227: note = promoter
  source 1..227: mol_type = other DNA
gagggcctatttcccatggttccttcatatttgcatagaggatgcaagactgtcagagggacgattaattaacttggccataaacacaaacctattggcacaaactatgtgatatagaaagttatgattgttcaagaagtttgtaatttaaaaaaaggaccactatgtacttaccgtaactgaaaagtctttcgttttctcaactttatatatcttccggaaaggac

SEQ ID NO: 6986 - DNA, 227 bp, synthetic construct
  misc_feature 1..227: note = promoter
  source 1..227: mol_type = other DNA
gagggcctatttcccatggttccttcatatttgcatagaggatgcaagactgtcagagggacgattgattaacttggccataaacacaaacctattggcacaaactatgtgatatagaaagttatgattgttcaagaagtttgtaatttaaaaaaaggaccactatgtacttaccgtaactgaaaagtctttcgttttctcaactttatatatcttccggaaaggac

SEQ ID NO: 6987 - DNA, 227 bp, synthetic construct
  misc_feature 1..227: note = promoter
  source 1..227: mol_type = other DNA
gagggcctatttcccatggttccttcatatttgcatagaggatgcaagactgtcagagggacgattgcttaacttggccataaacacaaacctattggcacaaactatgtgatatagaaagttatgattgttcaagaagtttgtaatttaaaaaaaggaccactatgtacttaccgtaactgaaaagtctttcgttttctcaactttatatatcttccggaaaggac

SEQ ID NO: 6988 - DNA, 227 bp, synthetic construct
  misc_feature 1..227: note = promoter
  source 1..227: mol_type = other DNA
gagggcctatttcccatggttccttcatatttgcatagaggatgcaagactgtcagagggacgattgcataacttggccataaacacaaacctattggcacaaactatgtgatatagaaagttatgattgttcaagaagtttgtaatttaaaaaaaggaccactatgtacttaccgtaactgaaaagtctttcgttttctcaactttatatatcttccggaaaggac

SEQ ID NO: 6989 - DNA, 227 bp, synthetic construct
  misc_feature 1..227: note = promoter
  source 1..227: mol_type = other DNA
gagggcctatttcccatggttccttcatatttgcatagaggatgcaagactgtcagagggacgattgcaaaacttggccataaacacaaacctattggcacaaactatgtgatatagaaagttatgattgttcaagaagtttgtaatttaaaaaaaggaccactatgtacttaccgtaactgaaaagtctttcgttttctcaactttatatatcttccggaaaggac

SEQ ID NO: 6990 - DNA, 227 bp, synthetic construct
  misc_feature 1..227: note = promoter
  source 1..227: mol_type = other DNA
gagggcctatttcccatggttccttcatatttgcatagaggatgcaagactgtcagagggacgattgcaatacttggccataaacacaaacctattggcacaaactatgtgatatagaaagttatgattgttcaagaagtttgtaatttaaaaaaaggaccactatgtacttaccgtaactgaaaagtctttcgttttctcaactttatatatcttccggaaaggac

SEQ ID NO: 6991 - DNA, 227 bp, synthetic construct
  misc_feature 1..227: note = promoter
  source 1..227: mol_type = other DNA
gagggcctatttcccatggttccttcatatttgcatagaggatgcaagactgtcagagggacgattgcaattcttggccataaacacaaacctattggcacaaactatgtgatatagaaagttatgattgttcaagaagtttgtaatttaaaaaaaggaccactatgtacttaccgtaactgaaaagtctttcgttttctcaactttatatatcttccggaaaggac

SEQ ID NO: 6992 - DNA, 227 bp, synthetic construct
  misc_feature 1..227: note = promoter
  source 1..227: mol_type = other DNA
gagggcctatttcccatggttccttcatatttgcatagaggatgcaagactgtcagagggacgattgcaattattggccataaacacaaacctattggcacaaactatgtgatatagaaagttatgattgttcaagaagtttgtaatttaaaaaaaggaccactatgtacttaccgtaactgaaaagtctttcgttttctcaactttatatatcttccggaaaggac

SEQ ID NO: 6993 - DNA, 227 bp, synthetic construct
  misc_feature 1..227: note = promoter
  source 1..227: mol_type = other DNA
gagggcctatttcccatggttccttcatatttgcatagaggatgcaagactgtcagagggacgattgcaattaatggccataaacacaaacctattggcacaaactatgtgatatagaaagttatgattgttcaagaagtttgtaatttaaaaaaaggaccactatgtacttaccgtaactgaaaagtctttcgttttctcaactttatatatcttccggaaaggac

SEQ ID NO: 6994 - DNA, 227 bp, synthetic construct
  misc_feature 1..227: note = promoter
  source 1..227: mol_type = other DNA
gagggcctatttcccatggttccttcatatttgcatagaggatgcaagactgtcagagggacgattgcaattaacggccataaacacaaacctattggcacaaactatgtgatatagaaagttatgattgttcaagaagtttgtaatttaaaaaaaggaccactatgtacttaccgtaactgaaaagtctttcgttttctcaactttatatatcttccggaaaggac

SEQ ID NO: 6995 - DNA, 227 bp, synthetic construct
  misc_feature 1..227: note = promoter
  source 1..227: mol_type = other DNA
gagggcctatttcccatggttccttcatatttgcatagaggatgcaagactgtcagagggacgattgcaattaactgccataaacacaaacctattggcacaaactatgtgatatagaaagttatgattgttcaagaagtttgtaatttaaaaaaaggaccactatgtacttaccgtaactgaaaagtctttcgttttctcaactttatatatcttccggaaaggac

SEQ ID NO: 6996 - DNA, 227 bp, synthetic construct
  misc_feature 1..227: note = promoter
  source 1..227: mol_type = other DNA
gagggcctatttcccatggttccttcatatttgcatagaggatgcaagactgtcagagggacgattgcaattaacttccataaacacaaacctattggcacaaactatgtgatatagaaagttatgattgttcaagaagtttgtaatttaaaaaaaggaccactatgtacttaccgtaactgaaaagtctttcgttttctcaactttatatatcttccggaaaggac

SEQ ID NO: 6997 - DNA, 227 bp, synthetic construct
  misc_feature 1..227: note = promoter
  source 1..227: mol_type = other DNA
gagggcctatttcccatggttccttcatatttgcatagaggatgcaagactgtcagagggacgattgcaattaacttgcataaacacaaacctattggcacaaactatgtgatatagaaagttatgattgttcaagaagtttgtaatttaaaaaaaggaccactatgtacttaccgtaactgaaaagtctttcgttttctcaactttatatatcttccggaaaggac

SEQ ID NO: 6998 - DNA, 227 bp, synthetic construct
  misc_feature 1..227: note = promoter
  source 1..227: mol_type = other DNA
gagggcctatttcccatggttccttcatatttgcatagaggatgcaagactgtcagagggacgattgcaattaacttggataaacacaaacctattggcacaaactatgtgatatagaaagttatgattgttcaagaagtttgtaatttaaaaaaaggaccactatgtacttaccgtaactgaaaagtctttcgttttctcaactttatatatcttccggaaaggac

SEQ ID NO: 6999 - DNA, 227 bp, synthetic construct
  misc_feature 1..227: note = promoter
  source 1..227: mol_type = other DNA
gagggcctatttcccatggttccttcatatttgcatagaggatgcaagactgtcagagggacgattgcaattaacttggctaaacacaaacctattggcacaaactatgtgatatagaaagttatgattgttcaagaagtttgtaatttaaaaaaaggaccactatgtacttaccgtaactgaaaagtctttcgttttctcaactttatatatcttccggaaaggac

SEQ ID NO: 7000 - DNA, 227 bp, synthetic construct
  misc_feature 1..227: note = promoter
  source 1..227: mol_type = other DNA
gagggcctatttcccatggttccttcatatttgcatagaggatgcaagactgtcagagggacgattgcaattaacttggccaaacacaaacctattggcacaaactatgtgatatagaaagttatgattgttcaagaagtttgtaatttaaaaaaaggaccactatgtacttaccgtaactgaaaagtctttcgttttctcaactttatatatcttccggaaaggac

SEQ ID NO: 7001 - DNA, 227 bp, synthetic construct; identical to SEQ ID NO: 7000
  misc_feature 1..227: note = promoter
  source 1..227: mol_type = other DNA

SEQ ID NO: 7002 - DNA, 227 bp, synthetic construct
  misc_feature 1..227: note = promoter
  source 1..227: mol_type = other DNA
gagggcctatttcccatggttccttcatatttgcatagaggatgcaagactgtcagagggacgattgcaattaacttggccatacacaaacctattggcacaaactatgtgatatagaaagttatgattgttcaagaagtttgtaatttaaaaaaaggaccactatgtacttaccgtaactgaaaagtctttcgttttctcaactttatatatcttccggaaaggac

SEQ ID NO: 7003 - DNA, 227 bp, synthetic construct; identical to SEQ ID NO: 7002
  misc_feature 1..227: note = promoter
  source 1..227: mol_type = other DNA

SEQ ID NO: 7004 - DNA, 227 bp, synthetic construct
  misc_feature 1..227: note = promoter
  source 1..227: mol_type = other DNA
gagggcctatttcccatggttccttcatatttgcatagaggatgcaagactgtcagagggacgattgcaattaacttggccataaacaaacctattggcacaaactatgtgatatagaaagttatgattgttcaagaagtttgtaatttaaaaaaaggaccactatgtacttaccgtaactgaaaagtctttcgttttctcaactttatatatcttccggaaaggac

SEQ ID NO: 7005 - DNA, 227 bp, synthetic construct; identical to SEQ ID NO: 7004
  misc_feature 1..227: note = promoter
  source 1..227: mol_type = other DNA

SEQ ID NO: 7006 - DNA, 227 bp, synthetic construct; identical to SEQ ID NO: 7004
  misc_feature 1..227: note = promoter
  source 1..227: mol_type = other DNA

SEQ ID NO: 7007 - DNA, 227 bp, synthetic construct; identical to SEQ ID NO: 7004
  misc_feature 1..227: note = promoter
  source 1..227: mol_type = other DNA

SEQ ID NO: 7008 - DNA, 227 bp, synthetic construct
  misc_feature 1..227: note = promoter
  source 1..227: mol_type = other DNA
gagggcctatttcccatggttccttcatatttgcatagaggatgcaagactgtcagagggacgattgcaattaacttggccataaacacacctattggcacaaactatgtgatatagaaagttatgattgttcaagaagtttgtaatttaaaaaaaggaccactatgtacttaccgtaactgaaaagtctttcgttttctcaactttatatatcttccggaaaggac

SEQ ID NO: 7009 - DNA, 227 bp, synthetic construct; identical to SEQ ID NO: 7008
  misc_feature 1..227: note = promoter
  source 1..227: mol_type = other DNA

SEQ ID NO: 7010 - DNA, 227 bp, synthetic construct
  misc_feature 1..227: note = promoter
  source 1..227: mol_type = other DNA
gagggcctatttcccatggttccttcatatttgcatagaggatgcaagactgtcagagggacgattgcaattaacttggccataaacacaactattggcacaaactatgtgatatagaaagttatgattgttcaagaagtttgtaatttaaaaaaaggaccactatgtacttaccgtaactgaaaagtctttcgttttctcaactttatatatcttccggaaaggac

SEQ ID NO: 7011 - DNA, 227 bp, synthetic construct
  misc_feature 1..227: note = promoter
  source 1..227: mol_type = other DNA
gagggcctatttcccatggttccttcatatttgcatagaggatgcaagactgtcagagggacgattgcaattaacttggccataaacacaaatattggcacaaactatgtgatatagaaagttatgattgttcaagaagtttgtaatttaaaaaaaggaccactatgtacttaccgtaactgaaaagtctttcgttttctcaactttatatatcttccggaaaggac

SEQ ID NO: 7012 - DNA, 227 bp, synthetic construct
  misc_feature 1..227: note = promoter
  source 1..227: mol_type = other DNA
gagggcctatttcccatggttccttcatatttgcatagaggatgcaagactgtcagagggacgattgcaattaacttggccataaacacaaacattggcacaaactatgtgatatagaaagttatgattgttcaagaagtttgtaatttaaaaaaaggaccactatgtacttaccgtaactgaaaagtctttcgttttctcaactttatatatcttccggaaaggac

SEQ ID NO: 7013 - DNA, 227 bp, synthetic construct
  misc_feature 1..227: note = promoter
  source 1..227: mol_type = other DNA
gagggcctatttcccatggttccttcatatttgcatagaggatgcaagactgtcagagggacgattgcaattaacttggccataaacacaaaccttggcacaaactatgtgatatagaaagttatgattgttcaagaagtttgtaatttaaaaaaaggaccactatgtacttaccgtaactgaaaagtctttcgttttctcaactttatatatcttccggaaaggac

SEQ ID NO: 7014 - DNA, 227 bp, synthetic construct; identical to SEQ ID NO: 7013
  misc_feature 1..227: note = promoter
  source 1..227: mol_type = other DNA

SEQ ID NO: 7015 - DNA, 227 bp, synthetic construct
  misc_feature 1..227: note = promoter
  source 1..227: mol_type = other DNA
gagggcctatttcccatggttccttcatatttgcatagaggatgcaagactgtcagagggacgattgcaattaacttggccataaacacaaacctaggcacaaactatgtgatatagaaagttatgattgttcaagaagtttgtaatttaaaaaaaggaccactatgtacttaccgtaactgaaaagtctttcgttttctcaactttatatatcttccggaaaggac

SEQ ID NO: 7016 - DNA, 227 bp, synthetic construct
  misc_feature 1..227: note = promoter
  source 1..227: mol_type = other DNA
gagggcctatttcccatggttccttcatatttgcatagaggatgcaagactgtcagagggacgattgcaattaacttggccataaacacaaacctatgcacaaactatgtgatatagaaagttatgattgttcaagaagtttgtaatttaaaaaaaggaccactatgtacttaccgtaactgaaaagtctttcgttttctcaactttatatatcttccggaaaggac

SEQ ID NO: 7017 - DNA, 227 bp, synthetic construct
  misc_feature 1..227: note = promoter
  source 1..227: mol_type = other DNA
gagggcctatttcccatggttccttcatatttgcatagaggatgcaagactgtcagagggacgattgcaattaacttggccataaacacaaacctattcacaaactatgtgatatagaaagttatgattgttcaagaagtttgtaatttaaaaaaaggaccactatgtacttaccgtaactgaaaagtctttcgttttctcaactttatatatcttccggaaaggac

SEQ ID NO: 7018 - DNA, 227 bp, synthetic construct
  misc_feature 1..227: note = promoter
  source 1..227: mol_type = other DNA
gagggcctatttcccatggttccttcatatttgcatagaggatgcaagactgtcagagggacgattgcaattaacttggccataaacacaaacctattgacaaactatgtgatatagaaagttatgattgttcaagaagtttgtaatttaaaaaaaggaccactatgtacttaccgtaactgaaaagtctttcgttttctcaactttatatatcttccggaaaggac

SEQ ID NO: 7019 - DNA, 227 bp, synthetic construct
  misc_feature 1..227: note = promoter
  source 1..227: mol_type = other DNA
gagggcctatttcccatggttccttcatatttgcatagaggatgcaagactgtcagagggacgattgcaattaacttggccataaacacaaacctattggcaaactatgtgatatagaaagttatgattgttcaagaagtttgtaatttaaaaaaaggaccactatgtacttaccgtaactgaaaagtctttcgttttctcaactttatatatcttccggaaaggac

SEQ ID NO: 7020 - DNA, 227 bp, synthetic construct; identical to SEQ ID NO: 7019
  misc_feature 1..227: note = promoter
  source 1..227: mol_type = other DNA

SEQ ID NO: 7021 - DNA, 227 bp, synthetic construct; identical to SEQ ID NO: 7019
  misc_feature 1..227: note = promoter
  source 1..227: mol_type = other DNA

SEQ ID NO: 7022 - DNA, 227 bp, synthetic construct
  misc_feature 1..227: note = promoter
  source 1..227: mol_type = other DNA
gagggcctatttcccatggttccttcatatttgcatagaggatgcaagactgtcagagggacgattgcaattaacttggccataaacacaaacctattggcacactatgtgatatagaaagttatgattgttcaagaagtttgtaatttaaaaaaaggaccactatgtacttaccgtaactgaaaagtctttcgttttctcaactttatatatcttccggaaaggac

SEQ ID NO: 7023 - DNA, 227 bp, synthetic construct; identical to SEQ ID NO: 7022
  misc_feature 1..227: note = promoter
  source 1..227: mol_type = other DNA

SEQ ID NO: 7024 - DNA, 227 bp, synthetic construct
  misc_feature 1..227: note = promoter
  source 1..227: mol_type = other DNA
gagggcctatttcccatggttccttcatatttgcatagaggatgcaagactgtcagagggacgattgcaattaacttggccataaacacaaacctattggcacaatatgtgatatagaaagttatgattgttcaagaagtttgtaatttaaaaaaaggaccactatgtacttaccgtaactgaaaagtctttcgttttctcaactttatatatcttccggaaaggac

SEQ ID NO: 7025 - DNA, 227 bp, synthetic construct
  misc_feature 1..227: note = promoter
  source 1..227: mol_type = other DNA
gagggcctatttcccatggttccttcatatttgcatagaggatgcaagactgtcagagggacgattgcaattaacttggccataaacacaaacctattggcacaaaatgtgatatagaaagttatgattgttcaagaagtttgtaatttaaaaaaaggaccactatgtacttaccgtaactgaaaagtctttcgttttctcaactttatatatcttccggaaaggac

SEQ ID NO: 7026 - DNA, 227 bp, synthetic construct
  misc_feature 1..227: note = promoter
  source 1..227: mol_type = other DNA
gagggcctatttcccatggttccttcatatttgcatagaggatgcaagactgtcagagggacgattgcaattaacttggccataaacacaaacctattggcacaaactgtgatatagaaagttatgattgttcaagaagtttgtaatttaaaaaaaggaccactatgtacttaccgtaactgaaaagtctttcgttttctcaactttatatatcttccggaaaggac

SEQ ID NO: 7027 - DNA, 227 bp, synthetic construct; identical to SEQ ID NO: 7026
  misc_feature 1..227: note = promoter
  source 1..227: mol_type = other DNA

SEQ ID NO: 7028 - DNA, 227 bp, synthetic construct
  misc_feature 1..227: note = promoter
  source 1..227: mol_type = other DNA
gagggcctatttcccatggttccttcatatttgcatagaggatgcaagactgtcagagggacgattgcaattaacttggccataaacacaaacctattggcacaaactatgatatagaaagttatgattgttcaagaagtttgtaatttaaaaaaaggaccactatgtacttaccgtaactgaaaagtctttcgttttctcaactttatatatcttccggaaaggac

SEQ ID NO: 7029 - DNA, 227 bp, synthetic construct; identical to SEQ ID NO: 7028
  misc_feature 1..227: note = promoter
  source 1..227: mol_type = other DNA

SEQ ID NO: 7030 - DNA, 227 bp, synthetic construct; identical to SEQ ID NO: 7028
  misc_feature 1..227: note = promoter
  source 1..227: mol_type = other DNA

SEQ ID NO: 7031 - DNA, 227 bp, synthetic construct
  misc_feature 1..227: note = promoter
  source 1..227: mol_type = other DNA
gagggcctatttcccatggttccttcatatttgcatagaggatgcaagactgtcagagggacgattgcaattaacttggccataaacacaaacctattggcacaaactatgttatagaaagttatgattgttcaagaagtttgtaatttaaaaaaaggaccactatgtacttaccgtaactgaaaagtctttcgttttctcaactttatatatcttccggaaaggac

SEQ ID NO: 7032 - DNA, 227 bp, synthetic construct
  misc_feature 1..227: note = promoter
  source 1..227: mol_type = other DNA
gagggcctatttcccatggttccttcatatttgcatagaggatgcaagactgtcagagggacgattgcaattaacttggccataaacacaaacctattggcacaaactatgtgatagaaagttatgattgttcaagaagtttgtaatttaaaaaaaggaccactatgtacttaccgtaactgaaaagtctttcgttttctcaactttatatatcttccggaaaggac

SEQ ID NO: 7033 - DNA, 227 bp, synthetic construct; identical to SEQ ID NO: 7032
  misc_feature 1..227: note = promoter
  source 1..227: mol_type = other DNA

SEQ ID NO: 7034 - DNA, 227 bp, synthetic construct; identical to SEQ ID NO: 7032
  misc_feature 1..227: note = promoter
  source 1..227: mol_type = other DNA

SEQ ID NO: 7035 - DNA, 227 bp, synthetic construct; identical to SEQ ID NO: 7032
  misc_feature 1..227: note = promoter
  source 1..227: mol_type = other DNA

SEQ ID NO: 7036 - DNA, 227 bp, synthetic construct
  misc_feature 1..227: note = promoter
  source 1..227: mol_type = other DNA
gagggcctatttcccatggttccttcatatttgcatagaggatgcaagactgtcagagggacgattgcaattaacttggccataaacacaaacctattggcacaaactatgtgatataaagttatgattgttcaagaagtttgtaatttaaaaaaaggaccactatgtacttaccgtaactgaaaagtctttcgttttctcaactttatatatcttccggaaaggac

SEQ ID NO: 7037 - DNA, 227 bp, synthetic construct; identical to SEQ ID NO: 7036
  misc_feature 1..227: note = promoter
  source 1..227: mol_type = other DNA

SEQ ID NO: 7038 - DNA, 227 bp, synthetic construct
  misc_feature 1..227: note = promoter
  source 1..227: mol_type = other DNA
gagggcctatttcccatggttccttcatatttgcatagaggatgcaagactgtcagagggacgattgcaattaacttggccataaacacaaacctattggcacaaactatgtgatatagagttatgattgttcaagaagtttgtaatttaaaaaaaggaccactatgtacttaccgtaactgaaaagtctttcgttttctcaactttatatatcttccggaaaggac

SEQ ID NO: 7039 - DNA, 227 bp, synthetic construct; identical to SEQ ID NO: 7038
  misc_feature 1..227: note = promoter
  source 1..227: mol_type = other DNA

SEQ ID NO: 7040 - DNA, 227 bp, synthetic construct
  misc_feature 1..227: note = promoter
  source 1..227: mol_type = other DNA
gagggcctatttcccatggttccttcatatttgcatagaggatgcaagactgtcagagggacgattgcaattaacttggccataaacacaaacctattggcacaaactatgtgatatagaattatgattgttcaagaagtttgtaatttaaaaaaaggaccactatgtacttaccgtaactgaaaagtctttcgttttctcaactttatatatcttccggaaaggac

SEQ ID NO: 7041 - DNA, 227 bp, synthetic construct
  misc_feature 1..227: note = promoter
  source 1..227: mol_type = other DNA
gagggcctatttcccatggttccttcatatttgcatagaggatgcaagactgtcagagggacgattgcaattaacttggccataaacacaaacctattggcacaaactatgtgatatagaaatatgattgttcaagaagtttgtaatttaaaaaaaggaccactatgtacttaccgtaactgaaaagtctttcgttttctcaactttatatatcttccggaaaggac

SEQ ID NO: 7042 - DNA, 227 bp, synthetic construct
  misc_feature 1..227: note = promoter
  source 1..227: mol_type = other DNA
gagggcctatttcccatggttccttcatatttgcatagaggatgcaagactgtcagagggacgattgcaattaacttggccataaacacaaacctattggcacaaactatgtgatatagaaagatgattgttcaagaagtttgtaatttaaaaaaaggaccactatgtacttaccgtaactgaaaagtctttcgttttctcaactttatatatcttccggaaaggac

SEQ ID NO: 7043 - DNA, 227 bp, synthetic construct
  misc_feature 1..227: note = promoter
  source 1..227: mol_type = other DNA
gagggcctatttcccatggttccttcatatttgcatagaggatgcaagactgtcagagggacgattgcaattaacttggccataaacacaaacctattggcacaaactatgtgatatagaaagttgattgttcaagaagtttgtaatttaaaaaaaggaccactatgtacttaccgtaactgaaaagtctttcgttttctcaactttatatatcttccggaaaggac

SEQ ID NO: 7044 - DNA, 227 bp, synthetic construct; identical to SEQ ID NO: 7043
  misc_feature 1..227: note = promoter
  source 1..227: mol_type = other DNA

SEQ ID NO: 7045 - DNA, 227 bp, synthetic construct
  misc_feature 1..227: note = promoter
  source 1..227: mol_type = other DNA
gagggcctatttcccatggttccttcatatttgcatagaggatgcaagactgtcagagggacgattgcaattaacttggccataaacacaaacctattggcacaaactatgtgatatagaaagttaattgttcaagaagtttgtaatttaaaaaaaggaccactatgtacttaccgtaactgaaaagtctttcgttttctcaactttatatatcttccggaaaggac

SEQ ID NO: 7046 - DNA, 227 bp, synthetic construct
  misc_feature 1..227: note = promoter
  source 1..227: mol_type = other DNA
gagggcctatttcccatggttccttcatatttgcatagaggatgcaagactgtcagagggacgattgcaattaacttggccataaacacaaacctattggcacaaactatgtgatatagaaagttatttgttcaagaagtttgtaatttaaaaaaaggaccactatgtacttaccgtaactgaaaagtctttcgttttctcaactttatatatcttccggaaaggac

SEQ ID NO: 7047 - DNA, 227 bp, synthetic construct
  misc_feature 1..227: note = promoter
  source 1..227: mol_type = other DNA
gagggcctatttcccatggttccttcatatttgcatagaggatgcaagactgtcagagggacgattgcaattaacttggccataaacacaaacctattggcacaaactatgtgatatagaaagttatgtgttcaagaagtttgtaatttaaaaaaaggaccactatgtacttaccgtaactgaaaagtctttcgttttctcaactttatatatcttccggaaaggac

SEQ ID NO: 7048 - DNA, 227 bp, synthetic construct
  misc_feature 1..227: note = promoter
  source 1..227: mol_type = other DNA
gagggcctatttcccatggttccttcatatttgcatagaggatgcaagactgtcagagggacgattgcaattaacttggccataaacacaaacctattggcacaaactatgtgatatagaaagttatgagttcaagaagtttgtaatttaaaaaaaggaccactatgtacttaccgtaactgaaaagtctttcgttttctcaactttatatatcttccggaaaggac

SEQ ID NO: 7049 - DNA, 227 bp, synthetic construct
  misc_feature 1..227: note = promoter
  source 1..227: mol_type = other DNA
gagggcctatttcccatggttccttcatatttgcatagaggatgcaagactgtcagagggacgattgcaattaacttggccataaacacaaacctattggcacaaactatgtgatatagaaagttatgatttcaagaagtttgtaatttaaaaaaaggaccactatgtacttaccgtaactgaaaagtctttcgttttctcaactttatatatcttccggaaaggac

SEQ ID NO: 7050 - DNA, 227 bp, synthetic construct; identical to SEQ ID NO: 7049
  misc_feature 1..227: note = promoter
  source 1..227: mol_type = other DNA

SEQ ID NO: 7051 - DNA, 227 bp, synthetic construct
  misc_feature 1..227: note = promoter
  source 1..227: mol_type = other DNA
gagggcctatttcccatggttccttcatatttgcatagaggatgcaagactgtcagagggacgattgcaattaacttggccataaacacaaacctattggcacaaactatgtgatatagaaagttatgattgcaagaagtttgtaatttaaaaaaaggaccactatgtacttaccgtaactgaaaagtctttcgttttctcaactttatatatcttccggaaaggac

SEQ ID NO: 7052 - DNA, 227 bp, synthetic construct
  misc_feature 1..227: note = promoter
  source 1..227: mol_type = other DNA
gagggcctatttcccatggttccttcatatttgcatagaggatgcaagactgtcagagggacgattgcaattaacttggccataaacacaaacctattggcacaaactatgtgatatagaaagttatgattgtaagaagtttgtaatttaaaaaaaggaccactatgtacttaccgtaactgaaaagtctttcgttttctcaactttatatatcttccggaaaggac

SEQ ID NO: 7053 - DNA, 227 bp, synthetic construct
  misc_feature 1..227: note = promoter
  source 1..227: mol_type = other DNA
gagggcctatttcccatggttccttcatatttgcatagaggatgcaagactgtcagagggacgattgcaattaacttggccataaacacaaacctattggcacaaactatgtgatatagaaagttatgattgttagaagtttgtaatttaaaaaaaggaccactatgtacttaccgtaactgaaaagtctttcgttttctcaactttatatatcttccggaaaggac

SEQ ID NO: 7054 - DNA, 227 bp, synthetic construct
  misc_feature 1..227: note = promoter
  source 1..227: mol_type = other DNA
gagggcctatttcccatggttccttcatatttgcatagaggatgcaagactgtcagagggacgattgcaattaacttggccataaacacaaacctattggcacaaactatgtgatatagaaagttatgattgttcgaagtttgtaatttaaaaaaaggaccactatgtacttaccgtaactgaaaagtctttcgttttctcaactttatatatcttccggaaaggac

SEQ ID NO: 7055 - DNA, 227 bp, synthetic construct
  misc_feature 1..227: note = promoter
  source 1..227: mol_type = other DNA
gagggcctatttcccatggttccttcatatttgcatagaggatgcaagactgtcagagggacgattgcaattaacttggccataaacacaaacctattggcacaaactatgtgatatagaaagttatgattgttcaaagtttgtaatttaaaaaaaggaccactatgtacttaccgtaactgaaaagtctttcgttttctcaactttatatatcttccggaaaggac

SEQ ID NO: 7056 - DNA, 227 bp, synthetic construct; identical to SEQ ID NO: 7055
  misc_feature 1..227: note = promoter
  source 1..227: mol_type = other DNA

SEQ ID NO: 7057 - DNA, 227 bp, synthetic construct
  misc_feature 1..227: note = promoter
  source 1..227: mol_type = other DNA
gagggcctatttcccatggttccttcatatttgcatagaggatgcaagactgtcagagggacgattgcaattaacttggccataaacacaaacctattggcacaaactatgtgatatagaaagttatgattgttcaaggtttgtaatttaaaaaaaggaccactatgtacttaccgtaactgaaaagtctttcgttttctcaactttatatatcttccggaaaggac

SEQ ID NO: 7058 - DNA, 227 bp, synthetic construct
  misc_feature 1..227: note = promoter
  source 1..227: mol_type = other DNA
gagggcctatttcccatggttccttcatatttgcatagaggatgcaagactgtcagagggacgattgcaattaacttggccataaacacaaacctattggcacaaactatgtgatatagaaagttatgattgttcaagatttgtaatttaaaaaaaggaccactatgtacttaccgtaactgaaaagtctttcgttttctcaactttatatatcttccggaaaggac

SEQ ID NO: 7059 - DNA, 227 bp, synthetic construct
  misc_feature 1..227: note = promoter
  source 1..227: mol_type = other DNA
gagggcctatttcccatggttccttcatatttgcatagaggatgcaagactgtcagagggacgattgcaattaacttggccataaacacaaacctattggcacaaactatgtgatatagaaagttatgattgttcaagaattgtaatttaaaaaaaggaccactatgtacttaccgtaactgaaaagtctttcgttttctcaactttatatatcttccggaaaggac

SEQ ID NO: 7060 - DNA, 227 bp, synthetic construct
  misc_feature 1..227: note = promoter
  source 1..227: mol_type = other DNA
gagggcctatttcccatggttccttcatatttgcatagaggatgcaagactgtcagagggacgattgcaattaacttggccataaacacaaacctattggcacaaactatgtgatatagaaagttatgattgttcaagaagtgtaatttaaaaaaaggaccactatgtacttaccgtaactgaaaagtctttcgttttctcaactttatatatcttccggaaaggac

SEQ ID NO: 7061 - DNA, 227 bp, synthetic construct; identical to SEQ ID NO: 7060
  misc_feature 1..227: note = promoter
  source 1..227: mol_type = other DNA

SEQ ID NO: 7062 - DNA, 227 bp, synthetic construct
  misc_feature 1..227: note = promoter
  source 1..227: mol_type = other DNA
gagggcctatttcccatggttccttcatatttgcatagaggatgcaagactgtcagagggacgattgcaattaacttggccataaacacaaacctattggcacaaactatgtgatatagaaagttatgattgttcaagaagtttaatttaaaaaaaggaccactatgtacttaccgtaactgaaaagtctttcgttttctcaactttatatatcttccggaaaggac

SEQ ID NO: 7063 - DNA, 227 bp, synthetic construct; identical to SEQ ID NO: 7062
  misc_feature 1..227: note = promoter
  source 1..227: mol_type = other DNA

SEQ ID NO: 7064 - DNA, 227 bp, synthetic construct
  misc_feature 1..227: note = promoter
  source 1..227: mol_type = other DNA
gagggcctatttcccatggttccttcatatttgcatagaggatgcaagactgtcagagggacgattgcaattaacttggccataaacacaaacctattggcacaaactatgtgatatagaaagttatgattgttcaagaagtttgatttaaaaaaaggaccactatgtacttaccgtaactgaaaagtctttcgttttctcaactttatatatcttccggaaaggac

SEQ ID NO: 7065 - DNA, 227 bp, synthetic construct
  misc_feature 1..227: note = promoter
  source 1..227: mol_type = other DNA
gagggcctatttcccatggttccttcatatttgcatagaggatgcaagactgtcagagggacgattgcaattaacttggccataaacacaaacctattggcacaaactatgtgatatagaaagttatgattgttcaagaagtttgttttaaaaaaaggaccactatgtacttaccgtaactgaaaagtctttcgttttctcaactttatatatcttccggaaaggac

SEQ ID NO: 7066 - DNA, 227 bp, synthetic construct
  misc_feature 1..227: note = promoter
  source 1..227: mol_type = other DNA
gagggcctatttcccatggttccttcatatttgcatagaggatgcaagactgtcagagggacgattgcaattaacttggccataaacacaaacctattggcacaaactatgtgatatagaaagttatgattgttcaagaagtttgtattaaaaaaaggaccactatgtacttaccgtaactgaaaagtctttcgttttctcaactttatatatcttccggaaaggac

SEQ ID NO: 7067 - DNA, 227 bp, synthetic construct
  misc_feature 1..227: note = promoter
  source 1..227: mol_type = other DNA
gagggcctatttcccatggttccttcatatttgcatagaggatgcaagactgtcagagggacgattgcaattaacttggccataaacacaaacctattggcacaaactatgtgatatagaaagttatgattgttcaagaagtttgtaataaaaaaaggaccactatgtacttaccgtaactgaaaagtctttcgttttctcaactttatatatcttccggaaaggac

SEQ ID NO: 7068 - DNA, 227 bp, synthetic construct; identical to SEQ ID NO: 7067
  misc_feature 1..227: note = promoter
  source 1..227: mol_type = other DNA

SEQ ID NO: 7069 - DNA, 227 bp, synthetic construct
  misc_feature 1..227: note = promoter
  source 1..227: mol_type = other DNA
gagggcctatttcccatggttccttcatatttgcatagaggatgcaagactgtcagagggacgattgcaattaacttggccataaacacaaacctattggcacaaactatgtgatatagaaagttatgattgttcaagaagtttgtaattaaaaaaggaccactatgtacttaccgtaactgaaaagtctttcgttttctcaactttatatatcttccggaaaggac

SEQ ID NO: 7070 - DNA, 227 bp, synthetic construct
  misc_feature 1..227: note = promoter
  source 1..227: mol_type = other DNA
gagggcctatttcccatggttccttcatatttgcatagaggatgcaagactgtcagagggacgattgcaattaacttggccataaacacaaacctattggcacaaactatgtgatatagaaagttatgattgttcaagaagtttgtaatttaaaaaggaccactatgtacttaccgtaactgaaaagtctttcgttttctcaactttatatatcttccggaaaggac

SEQ ID NO: 7071 - DNA, 227 bp, synthetic construct; identical to SEQ ID NO: 7070
  misc_feature 1..227: note = promoter
  source 1..227: mol_type = other DNA

SEQ ID NO: 7072 - DNA, 227 bp, synthetic construct; identical to SEQ ID NO: 7070
  misc_feature 1..227: note = promoter
  source 1..227: mol_type = other DNA

SEQ ID NO: 7073 - DNA, 227 bp, synthetic construct; identical to SEQ ID NO: 7070
  misc_feature 1..227: note = promoter
  source 1..227: mol_type = other DNA

SEQ ID NO: 7074 - DNA, 227 bp, synthetic construct; identical to SEQ ID NO: 7070
  misc_feature 1..227: note = promoter
  source 1..227: mol_type = other DNA

SEQ ID NO: 7075 - DNA, 227 bp, synthetic construct; identical to SEQ ID NO: 7070
  misc_feature 1..227: note = promoter
  source 1..227: mol_type = other DNA

SEQ ID NO: 7076 - DNA, 227 bp, synthetic construct
  misc_feature 1..227: note = promoter
  source 1..227: mol_type = other DNA
gagggcctatttcccatggttccttcatatttgcatagaggatgcaagactgtcagagggacgattgcaattaacttggccataaacacaaacctattggcacaaactatgtgatatagaaagttatgattgttcaagaagtttgtaatttaaaaaagaccactatgtacttaccgtaactgaaaagtctttcgttttctcaactttatatatcttccggaaaggac

SEQ ID NO: 7077 - DNA, 227 bp, synthetic construct
  misc_feature 1..227: note = promoter
  source 1..227: mol_type = other DNA
gagggcctatttcccatggttccttcatatttgcatagaggatgcaagactgtcagagggacgattgcaattaacttggccataaacacaaacctattggcacaaactatgtgatatagaaagttatgattgttcaagaagtttgtaatttaaaaaaaaccactatgtacttaccgtaactgaaaagtctttcgttttctcaactttatatatcttccggaaaggac

SEQ ID NO: 7078 - DNA, 227 bp, synthetic construct
  misc_feature 1..227: note = promoter
  source 1..227: mol_type = other DNA
gagggcctatttcccatggttccttcatatttgcatagaggatgcaagactgtcagagggacgattgcaattaacttggccataaacacaaacctattggcacaaactatgtgatatagaaagttatgattgttcaagaagtttgtaatttaaaaaaagccactatgtacttaccgtaactgaaaagtctttcgttttctcaactttatatatcttccggaaaggac

SEQ ID NO: 7079 - DNA, 227 bp, synthetic construct
  misc_feature 1..227: note = promoter
  source 1..227: mol_type = other DNA
gagggcctatttcccatggttccttcatatttgcatagaggatgcaagactgtcagagggacgattgcaattaacttggccataaacacaaacctattggcacaaactatgtgatatagaaagttatgattgttcaagaagtttgtaatttaaaaaaaggcactatgtacttaccgtaactgaaaagtctttcgttttctcaactttatatatcttccggaaaggac

SEQ ID NO: 7080 - DNA, 227 bp, synthetic construct
  misc_feature 1..227: note = promoter
  source 1..227: mol_type = other DNA
gagggcctatttcccatggttccttcatatttgcatagaggatgcaagactgtcagagggacgattgcaattaacttggccataaacacaaacctattggcacaaactatgtgatatagaaagttatgattgttcaagaagtttgtaatttaaaaaaaggaactatgtacttaccgtaactgaaaagtctttcgttttctcaactttatatatcttccggaaaggac

SEQ ID NO: 7081 - DNA, 227 bp, synthetic construct
  misc_feature 1..227: note = promoter
  source 1..227: mol_type = other DNA
gagggcctatttcccatggttccttcatatttgcatagaggatgcaagactgtcagagggacgattgcaattaacttggccataaacacaaacctattggcacaaactatgtgatatagaaagttatgattgttcaagaagtttgtaatttaaaaaaaggacctatgtacttaccgtaactgaaaagtctttcgttttctcaactttatatatcttccggaaaggac

SEQ ID NO: 7082 - DNA, 227 bp, synthetic construct; identical to SEQ ID NO: 7081
  misc_feature 1..227: note = promoter
  source 1..227: mol_type = other DNA

SEQ ID NO: 7083 - DNA, 227 bp, synthetic construct
  misc_feature 1..227: note = promoter
  source 1..227: mol_type = other DNA
gagggcctatttcccatggttccttcatatttgcatagaggatgcaagactgtcagagggacgattgcaattaacttggccataaacacaaacctattggcacaaactatgtgatatagaaagttatgattgttcaagaagtttgtaatttaaaaaaaggaccaatgtacttaccgtaactgaaaagtctttcgttttctcaactttatatatcttccggaaaggac

SEQ ID NO: 7084 - DNA, 227 bp, synthetic construct
  misc_feature 1..227: note = promoter
  source 1..227: mol_type = other DNA
gagggcctatttcccatggttccttcatatttgcatagaggatgcaagactgtcagagggacgattgcaattaacttggccataaacacaaacctattggcacaaactatgtgatatagaaagttatgattgttcaagaagtttgtaatttaaaaaaaggaccactgtacttaccgtaactgaaaagtctttcgttttctcaactttatatatcttccggaaaggac

SEQ ID NO: 7085 - DNA, 227 bp, synthetic construct; identical to SEQ ID NO: 7084
  misc_feature 1..227: note = promoter
  source 1..227: mol_type = other DNA

SEQ ID NO: 7086 - DNA, 227 bp, synthetic construct
  misc_feature 1..227: note = promoter
  source 1..227: mol_type = other DNA
gagggcctatttcccatggttccttcatatttgcatagaggatgcaagactgtcagagggacgattgcaattaacttggccataaacacaaacctattggcacaaactatgtgatatagaaagttatgattgttcaagaagtttgtaatttaaaaaaaggaccactatacttaccgtaactgaaaagtctttcgttttctcaactttatatatcttccggaaaggac

SEQ ID NO: 7087 - DNA, 227 bp, synthetic construct; identical to SEQ ID NO: 7086
  misc_feature 1..227: note = promoter
  source 1..227: mol_type = other DNA

SEQ ID NO: 7088 - DNA, 227 bp, synthetic construct
  misc_feature 1..227: note = promoter
  source 1..227: mol_type = other DNA
gagggcctatttcccatggttccttcatatttgcatagaggatgcaagactgtcagagggacgattgcaattaacttggccataaacacaaacctattggcacaaactatgtgatatagaaagttatgattgttcaagaagtttgtaatttaaaaaaaggaccactatgcttaccgtaactgaaaagtctttcgttttctcaactttatatatcttccggaaaggac

SEQ ID NO: 7089 - DNA, 227 bp, synthetic construct
  misc_feature 1..227: note = promoter
  source 1..227: mol_type = other DNA
gagggcctatttcccatggttccttcatatttgcatagaggatgcaagactgtcagagggacgattgcaattaacttggccataaacacaaacctattggcacaaactatgtgatatagaaagttatgattgttcaagaagtttgtaatttaaaaaaaggaccactatgtttaccgtaactgaaaagtctttcgttttctcaactttatatatcttccggaaaggac

SEQ ID NO: 7090 - DNA, 227 bp, synthetic construct
  misc_feature 1..227: note = promoter
  source 1..227: mol_type = other DNA
gagggcctatttcccatggttccttcatatttgcatagaggatgcaagactgtcagagggacgattgcaattaacttggccataaacacaaacctattggcacaaactatgtgatatagaaagttatgattgttcaagaagtttgtaatttaaaaaaaggaccactatgtataccgtaactgaaaagtctttcgttttctcaactttatatatcttccggaaaggac

SEQ ID NO: 7091 - DNA, 227 bp, synthetic construct
  misc_feature 1..227: note = promoter
  source 1..227: mol_type = other DNA
gagggcctatttcccatggttccttcatatttgcatagaggatgcaagactgtcagagggacgattgcaattaacttggccataaacacaaacctattggcacaaactatgtgatatagaaagttatgattgttcaagaagtttgtaatttaaaaaaaggaccactatgtacaccgtaactgaaaagtctttcgttttctcaactttatatatcttccggaaaggac

SEQ ID NO: 7092 - DNA, 227 bp, synthetic construct
  misc_feature 1..227: note = promoter
  source 1..227: mol_type = other DNA
gagggcctatttcccatggttccttcatatttgcatagaggatgcaagactgtcagagggacgattgcaattaacttggccataaacacaaacctattggcacaaactatgtgatatagaaagttatgattgttcaagaagtttgtaatttaaaaaaaggaccactatgtactccgtaactgaaaagtctttcgttttctcaactttatatatcttccggaaaggac

SEQ ID NO: 7093 - DNA, 227 bp, synthetic construct
  misc_feature 1..227: note = promoter
  source 1..227: mol_type = other DNA
gagggcctatttcccatggttccttcatatttgcatagaggatgcaagactgtcagagggacgattgcaattaacttggccataaacacaaacctattggcacaaactatgtgatatagaaagttatgattgttcaagaagtttgtaatttaaaaaaaggaccactatgtacttcgtaactgaaaagtctttcgttttctcaactttatatatcttccggaaaggac

SEQ ID NO: 7094 - DNA, 227 bp, synthetic construct
  misc_feature 1..227: note = promoter
  source 1..227: mol_type = other DNA
gagggcctatttcccatggttccttcatatttgcatagaggatgcaagactgtcagagggacgattgcaattaacttggccataaacacaaacctattggcacaaactatgtgatatagaaagttatgattgttcaagaagtttgtaatttaaaaaaaggaccactatgtacttagtaactgaaaagtctttcgttttctcaactttatatatcttccggaaaggac

SEQ ID NO: 7095 - DNA, 227 bp, synthetic construct
  misc_feature 1..227: note = promoter
  source 1..227: mol_type = other DNA
gagggcctatttcccatggttccttcatatttgcatagaggatgcaagactgtcagagggacgattgcaattaacttggccataaacacaaacctattggcacaaactatgtgatatagaaagttatgattgttcaagaagtttgtaatttaaaaaaaggaccactatgtacttactaactgaaaagtctttcgttttctcaactttatatatcttccggaaaggac

SEQ ID NO: 7096 - DNA, 227 bp, synthetic construct
  misc_feature 1..227: note = promoter
  source 1..227: mol_type = other DNA
gagggcctatttcccatggttccttcatatttgcatagaggatgcaagactgtcagagggacgattgcaattaacttggccataaacacaaacctattggcacaaactatgtgatatagaaagttatgattgttcaagaagtttgtaatttaaaaaaaggaccactatgtacttaccaactgaaaagtctttcgttttctcaactttatatatcttccggaaaggac

SEQ ID NO: 7097 - DNA, 227 bp, synthetic construct
  misc_feature 1..227: note = promoter
  source 1..227: mol_type = other DNA
gagggcctatttcccatggttccttcatatttgcatagaggatgcaagactgtcagagggacgattgcaattaacttggccataaacacaaacctattggcacaaactatgtgatatagaaagttatgattgttcaagaagtttgtaatttaaaaaaaggaccactatgtacttaccgactgaaaagtctttcgttttctcaactttatatatcttccggaaaggac

SEQ ID NO: 7098 - DNA, 227 bp, synthetic construct
  misc_feature 1..227: note = promoter
  source 1..227: mol_type = other DNA
gagggcctatttcccatggttccttcatatttgcatagaggatgcaagactgtcagagggacgattgcaattaacttggccataaacacaaacctattggcacaaactatgtgatatagaaagttatgattgttcaagaagtttgtaatttaaaaaaaggaccactatgtacttaccgtctgaaaagtctttcgttttctcaactttatatatcttccggaaaggac

SEQ ID NO: 7099 - DNA, 227 bp, synthetic construct
  misc_feature 1..227: note = promoter
  source 1..227: mol_type = other DNA
gagggcctatttcccatggttccttcatatttgcatagaggatgcaagactgtcagagggacgattgcaattaacttggccataaacacaaacctattggcacaaactatgtgatatagaaagttatgattgttcaagaagtttgtaatttaaaaaaaggaccactatgtacttaccgtatgaaaagtctttcgttttctcaactttatatatcttccggaaaggac

SEQ ID NO: 7100 - DNA, 227 bp, synthetic construct
  misc_feature 1..227: note = promoter
  source 1..227: mol_type = other DNA
gagggcctatttcccatggttccttcatatttgcatagaggatgcaagactgtcagagggacgattgcaattaacttggccataaacacaaacctattggcacaaactatgtgatatagaaagttatgattgttcaagaagtttgtaatttaaaaaaaggaccactatgtacttaccgtaagaaaagtctttcgttttctcaactttatatatcttccggaaaggac

SEQ ID NO: 7101 - DNA, 227 bp, synthetic construct
  misc_feature 1..227: note = promoter
  source 1..227: mol_type = other DNA
gagggcctatttcccatggttccttcatatttgcatagaggatgcaagactgtcagagggacgattgcaattaacttggccataaacacaaacctattggcacaaactatgtgatatagaaagttatgattgttcaagaagtttgtaatttaaaaaaaggaccactatgtacttaccgtaacaaaagtctttcgttttctcaactttatatatcttccggaaaggac

SEQ ID NO: 7102 - DNA, 227 bp, synthetic construct
  misc_feature 1..227: note = promoter
  source 1..227: mol_type = other DNA
gagggcctatttcccatggttccttcatatttgcatagaggatgcaagactgtcagagggacgattgcaattaacttggccataaacacaaacctattggcacaaactatgtgatatagaaagttatgattgttcaagaagtttgtaatttaaaaaaaggaccactatgtacttaccgtaactaaagtctttcgttttctcaactttatatatcttccggaaaggac

SEQ ID NO: 7103 - DNA, 227 bp, synthetic construct
  misc_feature 1..227: note = promoter
  source 1..227: mol_type = other DNA
gagggcctatttcccatggttccttcatatttgcatagaggatgcaagactgtcagagggacgattgcaattaacttggccataaacacaaacctattggcacaaactatgtgatatagaaagttatgattgttcaagaagtttgtaatttaaaaaaaggaccactatgtacttaccgtaactgaagtctttcgttttctcaactttatatatcttccggaaaggac

SEQ ID NO: 7104 - DNA, 227 bp, synthetic construct; identical to SEQ ID NO: 7103
  misc_feature 1..227: note = promoter
  source 1..227: mol_type = other DNA

SEQ ID NO: 7105 - DNA, 227 bp, synthetic construct; identical to SEQ ID NO: 7103
  misc_feature 1..227: note = promoter
  source 1..227: mol_type = other DNA

SEQ ID NO: 7106 - DNA, 227 bp, synthetic construct
  misc_feature 1..227: note = promoter
  source 1..227: mol_type = other DNA
gagggcctatttcccatggttccttcatatttgcatagaggatgcaagactgtcagagggacgattgcaattaacttggccataaacacaaacctattggcacaaactatgtgatatagaaagttatgattgttcaagaagtttgtaatttaaaaaaaggaccactatgtacttaccgtaactgaaatctttcgttttctcaactttatatatcttccggaaaggac

SEQ ID NO: 7107 - DNA, 227 bp, synthetic construct
  misc_feature 1..227: note = promoter
  source 1..227: mol_type = other DNA
gagggcctatttcccatggttccttcatatttgcatagaggatgcaagactgtcagagggacgattgcaattaacttggccataaacacaaacctattggcacaaactatgtgatatagaaagttatgattgttcaagaagtttgtaatttaaaaaaaggaccactatgtacttaccgtaactgaaaactttcgttttctcaactttatatatcttccggaaaggac

SEQ ID NO: 7108 - DNA, 227 bp, synthetic construct
  misc_feature 1..227: note = promoter
  source 1..227: mol_type = other DNA
gagggcctatttcccatggttccttcatatttgcatagaggatgcaagactgtcagagggacgattgcaattaacttggccataaacacaaacctattggcacaaactatgtgatatagaaagttatgattgttcaagaagtttgtaatttaaaaaaaggaccactatgtacttaccgtaactgaaaagtttcgttttctcaactttatatatcttccggaaaggac

SEQ ID NO: 7109 - DNA, 227 bp, synthetic construct; identical to SEQ ID NO: 7108
  misc_feature 1..227: note = promoter
  source 1..227: mol_type = other DNA

SEQ ID NO: 7110 - DNA, 227 bp, synthetic construct
  misc_feature 1..227: note = promoter
  source 1..227: mol_type = other DNA
gagggcctatttcccatggttccttcatatttgcatagaggatgcaagactgtcagagggacgattgcaattaacttggccataaacacaaacctattggcacaaactatgtgatatagaaagttatgattgttcaagaagtttgtaatttaaaaaaaggaccactatgtacttaccgtaactgaaaagtctcgttttctcaactttatatatcttccggaaaggac

SEQ ID NO: 7111 - DNA, 227 bp, synthetic construct; identical to SEQ ID NO: 7110
  misc_feature 1..227: note = promoter
  source 1..227: mol_type = other DNA

SEQ ID NO: 7112 - DNA, 227 bp, synthetic construct
  misc_feature 1..227: note = promoter
  source 1..227: mol_type = other DNA
gagggcctatttcccatggttccttcatatttgcatagaggatgcaagactgtcagagggacgattgcaattaacttggccataaacacaaacctattggcacaaactatgtgatatagaaagttatgattgttcaagaagtttgtaatttaaaaaaaggaccactatgtacttaccgtaactgaaaagtcttgttttctcaactttatatatcttccggaaaggac

SEQ ID NO: 7113 - DNA, 227 bp, synthetic construct
  misc_feature 1..227: note = promoter
  source 1..227: mol_type = other DNA
gagggcctatttcccatggttccttcatatttgcatagaggatgcaagactgtcagagggacgattgcaattaacttggccataaacacaaacctattggcacaaactatgtgatatagaaagttatgattgttcaagaagtttgtaatttaaaaaaaggaccactatgtacttaccgtaactgaaaagtctttttttctcaactttatatatcttccggaaaggac

SEQ ID NO: 7114 - DNA, 227 bp, synthetic construct
  misc_feature 1..227: note = promoter
  source 1..227: mol_type = other DNA
gagggcctatttcccatggttccttcatatttgcatagaggatgcaagactgtcagagggacgattgcaattaacttggccataaacacaaacctattggcacaaactatgtgatatagaaagttatgattgttcaagaagtttgtaatttaaaaaaaggaccactatgtacttaccgtaactgaaaagtctttctttctcaactttatatatcttccggaaaggac

SEQ ID NO: 7115 - DNA, 227 bp, synthetic construct
  misc_feature 1..227: note = promoter
  source 1..227: mol_type = other DNA
gagggcctatttcccatggttccttcatatttgcatagaggatgcaagactgtcagagggacgattgcaattaacttggccataaacacaaacctattggcacaaactatgtgatatagaaagttatgattgttcaagaagtttgtaatttaaaaaaaggaccactatgtacttaccgtaactgaaaagtctttcgttctcaactttatatatcttccggaaaggac

SEQ ID NO: 7116 - DNA, 227 bp, synthetic construct; identical to SEQ ID NO: 7115
  misc_feature 1..227: note = promoter
  source 1..227: mol_type = other DNA

SEQ ID NO: 7117 - DNA, 227 bp, synthetic construct; identical to SEQ ID NO: 7115
  misc_feature 1..227: note = promoter
  source 1..227: mol_type = other DNA

SEQ ID NO: 7118 - DNA, 227 bp, synthetic construct
  misc_feature 1..227: note = promoter
  source 1..227: mol_type = other DNA
gagggcctatttcccatggttccttcatatttgcatagaggatgcaagactgtcagagggacgattgcaattaacttggccataaacacaaacctattggcacaaactatgtgatatagaaagttatgattgttcaagaagtttgtaatttaaaaaaaggaccactatgtacttaccgtaactgaaaagtctttcgttttcaactttatatatcttccggaaaggac

SEQ ID NO: 7119 - DNA, 227 bp, synthetic construct; identical to SEQ ID NO: 7118
  misc_feature 1..227: note = promoter
  source 1..227: mol_type = other DNA

SEQ ID NO: 7120 - DNA, 227 bp, synthetic construct; identical to SEQ ID NO: 7118
  misc_feature 1..227: note = promoter
  source 1..227: mol_type = other DNA

SEQ ID NO: 7121 - DNA, 227 bp, synthetic construct
  misc_feature 1..227: note = promoter
  source 1..227: mol_type = other DNA
gagggcctatttcccatggttccttcatatttgcatagaggatgcaagactgtcagagggacgattgcaattaacttggccataaacacaaacctattggcacaaactatgtgatatagaaagttatgattgttcaagaagtttgtaatttaaaaaaaggaccactatgtacttaccgtaactgaaaagtctttcgttttctactttatatatcttccggaaaggac

SEQ ID NO: 7122 - DNA, 227 bp, synthetic construct
  misc_feature 1..227: note = promoter
  source 1..227: mol_type = other DNA
gagggcctatttcccatggttccttcatatttgcatagaggatgcaagactgtcagagggacgattgcaattaacttggccataaacacaaacctattggcacaaactatgtgatatagaaagttatgattgttcaagaagtttgtaatttaaaaaaaggaccactatgtacttaccgtaactgaaaagtctttcgttttctcctttatatatcttccggaaaggac

SEQ ID NO: 7123 - DNA, 227 bp, synthetic construct
  misc_feature 1..227: note = promoter
  source 1..227: mol_type = other DNA
gagggcctatttcccatggttccttcatatttgcatagaggatgcaagactgtcagagggacgattgcaattaacttggccataaacacaaacctattggcacaaactatgtgatatagaaagttatgattgttcaagaagtttgtaatttaaaaaaaggaccactatgtacttaccgtaactgaaaagtctttcgttttctcatttatatatcttccggaaaggac

SEQ ID NO: 7124 - DNA, 227 bp, synthetic construct
  misc_feature 1..227: note = promoter
  source 1..227: mol_type = other DNA
gagggcctatttcccatggttccttcatatttgcatagaggatgcaagactgtcagagggacgattgcaattaacttggccataaacacaaacctattggcacaaactatgtgatatagaaagttatgattgttcaagaagtttgtaatttaaaaaaaggaccactatgtacttaccgtaactgaaaagtctttcgttttctcaattatatatcttccggaaaggac

SEQ ID NO: 7125 - DNA, 227 bp, synthetic construct
  misc_feature 1..227: note = promoter
  source 1..227: mol_type = other DNA
gagggcctatttcccatggttccttcatatttgcatagaggatgcaagactgtcagagggacgattgcaattaacttggccataaacacaaacctattggcacaaactatgtgatatagaaagttatgattgttcaagaagtttgtaatttaaaaaaaggaccactatgtacttaccgtaactgaaaagtctttcgttttctcaactatatatcttccggaaaggac

SEQ ID NO: 7126 - DNA, 227 bp, synthetic construct; identical to SEQ ID NO: 7125
  misc_feature 1..227: note = promoter
  source 1..227: mol_type = other DNA

SEQ ID NO: 7127 - DNA, 227 bp, synthetic construct
  misc_feature 1..227: note = promoter
  source 1..227: mol_type = other DNA
gagggcctatttcccatggttccttcatatttgcatagaggatgcaagactgtcagagggacgattgcaattaacttggccataaacacaaacctattggcacaaactatgtgatatagaaagttatgattgttcaagaagtttgtaatttaaaaaaaggaccactatgtacttaccgtaactgaaaagtctttcgttttctcaactttatatcttccggaaaggac

SEQ ID NO: 7128 - DNA, 227 bp, synthetic construct; identical to SEQ ID NO: 7127
  misc_feature 1..227: note = promoter
  source 1..227: mol_type = other DNA

SEQ ID NO: 7129 - DNA, 227 bp, synthetic construct; identical to SEQ ID NO: 7127
  misc_feature 1..227: note = promoter
  source 1..227: mol_type = other DNA

SEQ ID NO: 7130 - DNA, 227 bp, synthetic construct; identical to SEQ ID NO: 7127
  misc_feature 1..227: note = promoter
  source 1..227: mol_type = other DNA

SEQ ID NO: 7131 - DNA, 227 bp, synthetic construct; identical to SEQ ID NO: 7127
  misc_feature 1..227: note = promoter
  source 1..227: mol_type = other DNA

SEQ ID NO: 7132 - DNA, 227 bp, synthetic construct; identical to SEQ ID NO: 7127
  misc_feature 1..227: note = promoter
  source 1..227: mol_type = other DNA

SEQ ID NO: 7133 - DNA, 227 bp, synthetic construct
  misc_feature 1..227: note = promoter
  source 1..227: mol_type = other DNA
gagggcctatttcccatggttccttcatatttgcatagaggatgcaagactgtcagagggacgattgcaattaacttggccataaacacaaacctattggcacaaactatgtgatatagaaagttatgattgttcaagaagtttgtaatttaaaaaaaggaccactatgtacttaccgtaactgaaaagtctttcgttttctcaactttatatattccggaaaggac

SEQ ID NO: 7134 - DNA, 227 bp, synthetic construct; identical to SEQ ID NO: 7133
  misc_feature 1..227: note = promoter
  source 1..227: mol_type = other DNA

SEQ ID NO: 7135 - DNA, 227 bp, synthetic construct
  misc_feature 1..227: note = promoter
  source 1..227: mol_type = other DNA
gagggcctatttcccatggttccttcatatttgcatagaggatgcaagactgtcagagggacgattgcaattaacttggccataaacacaaacctattggcacaaactatgtgatatagaaagttatgattgttcaagaagtttgtaatttaaaaaaaggaccactatgtacttaccgtaactgaaaagtctttcgttttctcaactttatatatcccggaaaggac

SEQ ID NO: 7136 - DNA, 227 bp, synthetic construct
  misc_feature 1..227: note = promoter
  source 1..227: mol_type = other DNA
gagggcctatttcccatggttccttcatatttgcatagaggatgcaagactgtcagagggacgattgcaattaacttggccataaacacaaacctattggcacaaactatgtgatatagaaagttatgattgttcaagaagtttgtaatttaaaaaaaggaccactatgtacttaccgtaactgaaaagtctttcgttttctcaactttatatatctcggaaaggac

SEQ ID NO: 7137 - DNA, 227 bp, synthetic construct
  misc_feature 1..227: note = promoter
  source 1..227: mol_type = other DNA
gagggcctatttcccatggttccttcatatttgcatagaggatgcaagactgtcagagggacgattgcaattaacttggccataaacacaaacctattggcacaaactatgtgatatagaaagttatgattgttcaagaagtttgtaatttaaaaaaaggaccactatgtacttaccgtaactgaaaagtctttcgttttctcaactttatatatcttggaaaggac

SEQ ID NO: 7138 - DNA, 227 bp, synthetic construct
  misc_feature 1..227: note = promoter
  source 1..227: mol_type = other DNA
gagggcctatttcccatggttccttcatatttgcatagaggatgcaagactgtcagagggacgattgcaattaacttggccataaacacaaacctattggcacaaactatgtgatatagaaagttatgattgttcaagaagtttgtaatttaaaaaaaggaccactatgtacttaccgtaactgaaaagtctttcgttttctcaactttatatatcttcgaaaggac

SEQ ID NO: 7139 - DNA, 227 bp, synthetic construct
  misc_feature 1..227: note = promoter
  source 1..227: mol_type = other DNA
gagggcctatttcccatggttccttcatatttgcatagaggatgcaagactgtcagagggacgattgcaattaacttggccataaacacaaacctattggcacaaactatgtgatatagaaagttatgattgttcaagaagtttgtaatttaaaaaaaggaccactatgtacttaccgtaactgaaaagtctttcgttttctcaactttatatatcttccaaaggac

SEQ ID NO: 7140 - DNA, 227 bp, synthetic construct
  misc_feature 1..227: note = promoter
  source 1..227: mol_type = other DNA
gagggcctatttcccatggttccttcatatttgcatagaggatgcaagactgtcagagggacgattgcaattaacttggccataaacacaaacctattggcacaaactatgtgatatagaaagttatgattgttcaagaagtttgtaatttaaaaaaaggaccactatgtacttaccgtaactgaaaagtctttcgttttctcaactttatatatcttccgaaggac

SEQ ID NO: 7141 - DNA, 227 bp, synthetic construct
  misc_feature 1..227: note = promoter
  source 1..227: mol_type = other DNA
gagggcctatttcccatggttccttcatatttgcatagaggatgcaagactgtcagagggacgattgcaattaacttggccataaacacaaacctattggcacaaactatgtgatatagaaagttatgattgttcaagaagtttgtaatttaaaaaaaggaccactatgtacttaccgtaactgaaaagtctttcgttttctcaactttatatatcttccggaggac

SEQ ID NO: 7142 - DNA, 227 bp, synthetic construct; identical to SEQ ID NO: 7141
  misc_feature 1..227: note = promoter
  source 1..227: mol_type = other DNA

SEQ ID NO: 7143 - DNA, 227 bp, synthetic construct
  misc_feature 1..227: note = promoter
  source 1..227: mol_type = other DNA
gagggcctatttcccatggttccttcatatttgcatagaggatgcaagactgtcagagggacgattgcaattaacttggccataaacacaaacctattggcacaaactatgtgatatagaaagttatgattgttcaagaagtttgtaatttaaaaaaaggaccactatgtacttaccgtaactgaaaagtctttcgttttctcaactttatatatcttccggaagac

SEQ ID NO: 7144 - DNA, 227 bp, synthetic construct
  misc_feature 1..227: note = promoter
  source 1..227: mol_type = other DNA
gagggcctatttcccatggttccttcatatttgcatagaggatgcaagactgtcagagggacgattgcaattaacttggccataaacacaaacctattggcacaaactatgtgatatagaaagttatgattgttcaagaagtttgtaatttaaaaaaaggaccactatgtacttaccgtaactgaaaagtctttcgttttctcaactttatatatcttccggaaaac

SEQ ID NO: 7145 - DNA, 227 bp, synthetic construct
  misc_feature 1..227: note = promoter
  source 1..227: mol_type = other DNA
gagggcctatttcccatggttccttcatatttgcatagaggatgcaagactgtcagagggacgattgcaattaacttggccataaacacaaacctattggcacaaactatgtgatatagaaagttatgattgttcaagaagtttgtaatttaaaaaaaggaccactatgtacttaccgtaactgaaaagtctttcgttttctcaactttatatatcttccggaaagc

SEQ ID NO: 7146 - DNA, 227 bp, synthetic construct
  misc_feature 1..227: note = promoter
  source 1..227: mol_type = other DNA
gagggcctatttcccatggttccttcatatttgcatagaggatgcaagactgtcagagggacgattgcaattaacttggccataaacacaaacctattggcacaaactatgtgatatagaaagttatgattgttcaagaagtttgtaatttaaaaaaaggaccactatgtacttaccgtaactgaaaagtctttcgttttctcaactttatatatcttccggaaagg

SEQ ID NO: 7147 - DNA, 228 bp, synthetic construct; identical to SEQ ID NO: 6918
  misc_feature 1..228: note = promoter
  source 1..228: mol_type = other DNA

SEQ ID NO: 7148 - DNA, 224 bp, synthetic construct
  misc_feature 1..224: note = promoter
  source 1..224: mol_type = other DNA
cctatttcccatggttccttcatatttgcatagaggatgcaagactgtcagagggacgattgcaattaacttggccataaacacaaacctattggcacaaactatgtgatatagaaagttatgattgttcaagaagtttgtaatttaaaaaaaggaccactatgtacttaccgtaactgaaaagtctttcgttttctcaactttatatatcttccggaaaggac

SEQ ID NO: 7149 - DNA, 224 bp, synthetic construct
  misc_feature 1..224: note = promoter
  source 1..224: mol_type = other DNA
gctatttcccatggttccttcatatttgcatagaggatgcaagactgtcagagggacgattgcaattaacttggccataaacacaaacctattggcacaaactatgtgatatagaaagttatgattgttcaagaagtttgtaatttaaaaaaaggaccactatgtacttaccgtaactgaaaagtctttcgttttctcaactttatatatcttccggaaaggac

SEQ ID NO: 7150 - DNA, 224 bp, synthetic construct
  misc_feature 1..224: note = promoter
  source 1..224: mol_type = other DNA
gatatttcccatggttccttcatatttgcatagaggatgcaagactgtcagagggacgattgcaattaacttggccataaacacaaacctattggcacaaactatgtgatatagaaagttatgattgttcaagaagtttgtaatttaaaaaaaggaccactatgtacttaccgtaactgaaaagtctttcgttttctcaactttatatatcttccggaaaggac

SEQ ID NO: 7151 - DNA, 224 bp, synthetic construct
  misc_feature 1..224: note = promoter
  source 1..224: mol_type = other DNA
gagatttcccatggttccttcatatttgcatagaggatgcaagactgtcagagggacgattgcaattaacttggccataaacacaaacctattggcacaaactatgtgatatagaaagttatgattgttcaagaagtttgtaatttaaaaaaaggaccactatgtacttaccgtaactgaaaagtctttcgttttctcaactttatatatcttccggaaaggac

SEQ ID NO: 7152 - DNA, 224 bp, synthetic construct
  misc_feature 1..224: note = promoter
  source 1..224: mol_type = other DNA
gaggtttcccatggttccttcatatttgcatagaggatgcaagactgtcagagggacgattgcaattaacttggccataaacacaaacctattggcacaaactatgtgatatagaaagttatgattgttcaagaagtttgtaatttaaaaaaaggaccactatgtacttaccgtaactgaaaagtctttcgttttctcaactttatatatcttccggaaaggac

SEQ ID NO: 7153 - DNA, 224 bp, synthetic construct
  misc_feature 1..224: note = promoter
  source 1..224: mol_type = other DNA
gagggttcccatggttccttcatatttgcatagaggatgcaagactgtcagagggacgattgcaattaacttggccataaacacaaacctattggcacaaactatgtgatatagaaagttatgattgttcaagaagtttgtaatttaaaaaaaggaccactatgtacttaccgtaactgaaaagtctttcgttttctcaactttatatatcttccggaaaggac

SEQ ID NO: 7154 - DNA, 224 bp, synthetic construct
  misc_feature 1..224: note = promoter
  source 1..224: mol_type = other DNA
gagggctcccatggttccttcatatttgcatagaggatgcaagactgtcagagggacgattgcaattaacttggccataaacacaaacctattggcacaaactatgtgatatagaaagttatgattgttcaagaagtttgtaatttaaaaaaaggaccactatgtacttaccgtaactgaaaagtctttcgttttctcaactttatatatcttccggaaaggac

SEQ ID NO: 7155 - DNA, 224 bp, synthetic construct
  misc_feature 1..224: note = promoter
  source 1..224: mol_type = other DNA
gagggcccccatggttccttcatatttgcatagaggatgcaagactgtcagagggacgattgcaattaacttggccataaacacaaacctattggcacaaactatgtgatatagaaagttatgattgttcaagaagtttgtaatttaaaaaaaggaccactatgtacttaccgtaactgaaaagtctttcgttttctcaactttatatatcttccggaaaggac

SEQ ID NO: 7156 - DNA, 224 bp, synthetic construct
  misc_feature 1..224: note = promoter
  source 1..224: mol_type = other DNA
gagggcctccatggttccttcatatttgcatagaggatgcaagactgtcagagggacgattgcaattaacttggccataaacacaaacctattggcacaaactatgtgatatagaaagttatgattgttcaagaagtttgtaatttaaaaaaaggaccactatgtacttaccgtaactgaaaagtctttcgttttctcaactttatatatcttccggaaaggac

SEQ ID NO: 7157 - DNA, 224 bp, synthetic construct
  misc_feature 1..224: note = promoter
  source 1..224: mol_type = other DNA
gagggcctacatggttccttcatatttgcatagaggatgcaagactgtcagagggacgattgcaattaacttggccataaacacaaacctattggcacaaactatgtgatatagaaagttatgattgttcaagaagtttgtaatttaaaaaaaggaccactatgtacttaccgtaactgaaaagtctttcgttttctcaactttatatatcttccggaaaggac

SEQ ID NO: 7158 - DNA, 224 bp, synthetic construct
  misc_feature 1..224: note = promoter
  source 1..224: mol_type = other DNA
gagggcctatatggttccttcatatttgcatagaggatgcaagactgtcagagggacgattgcaattaacttggccataaacacaaacctattggcacaaactatgtgatatagaaagttatgattgttcaagaagtttgtaatttaaaaaaaggaccactatgtacttaccgtaactgaaaagtctttcgttttctcaactttatatatcttccggaaaggac

SEQ ID NO: 7159 - DNA, 224 bp, synthetic construct
  misc_feature 1..224: note = promoter
  source 1..224: mol_type = other DNA
gagggcctatttggttccttcatatttgcatagaggatgcaagactgtcagagggacgattgcaattaacttggccataaacacaaacctattggcacaaactatgtgatatagaaagttatgattgttcaagaagtttgtaatttaaaaaaaggaccactatgtacttaccgtaactgaaaagtctttcgttttctcaactttatatatcttccggaaaggac

SEQ ID NO: 7160 - DNA, 224 bp, synthetic construct; identical to SEQ ID NO: 7159
  misc_feature 1..224: note = promoter
  source 1..224: mol_type = other DNA

SEQ ID NO: 7161 - DNA, 224 bp, synthetic construct
  misc_feature 1..224: note = promoter
  source 1..224: mol_type = other DNA
gagggcctatttcgttccttcatatttgcatagaggatgcaagactgtcagagggacgattgcaattaacttggccataaacacaaacctattggcacaaactatgtgatatagaaagttatgattgttcaagaagtttgtaatttaaaaaaaggaccactatgtacttaccgtaactgaaaagtctttcgttttctcaactttatatatcttccggaaaggac

SEQ ID NO: 7162 - DNA, 224 bp, synthetic construct
  misc_feature 1..224: note = promoter
  source 1..224: mol_type = other DNA
gagggcctatttccttccttcatatttgcatagaggatgcaagactgtcagagggacgattgcaattaacttggccataaacacaaacctattggcacaaactatgtgatatagaaagttatgattgttcaagaagtttgtaatttaaaaaaaggaccactatgtacttaccgtaactgaaaagtctttcgttttctcaactttatatatcttccggaaaggac

SEQ ID NO: 7163 - DNA, 224 bp, synthetic construct
  misc_feature 1..224: note = promoter
  source 1..224: mol_type = other DNA
gagggcctatttccctccttcatatttgcatagaggatgcaagactgtcagagggacgattgcaattaacttggccataaacacaaacctattggcacaaactatgtgatatagaaagttatgattgttcaagaagtttgtaatttaaaaaaaggaccactatgtacttaccgtaactgaaaagtctttcgttttctcaactttatatatcttccggaaaggac

SEQ ID NO: 7164 - DNA, 224 bp, synthetic construct
  misc_feature 1..224: note = promoter
  source 1..224: mol_type = other DNA
gagggcctatttcccaccttcatatttgcatagaggatgcaagactgtcagagggacgattgcaattaacttggccataaacacaaacctattggcacaaactatgtgatatagaaagttatgattgttcaagaagtttgtaatttaaaaaaaggaccactatgtacttaccgtaactgaaaagtctttcgttttctcaactttatatatcttccggaaaggac

SEQ ID NO: 7165 - DNA, 224 bp, synthetic construct
  misc_feature 1..224: note = promoter
  source 1..224: mol_type = other DNA
gagggcctatttcccatcttcatatttgcatagaggatgcaagactgtcagagggacgattgcaattaacttggccataaacacaaacctattggcacaaactatgtgatatagaaagttatgattgttcaagaagtttgtaatttaaaaaaaggaccactatgtacttaccgtaactgaaaagtctttcgttttctcaactttatatatcttccggaaaggac

SEQ ID NO: 7166 - DNA, 224 bp, synthetic construct
  misc_feature 1..224: note = promoter
  source 1..224: mol_type = other DNA
gagggcctatttcccatgttcatatttgcatagaggatgcaagactgtcagagggacgattgcaattaacttggccataaacacaaacctattggcacaaactatgtgatatagaaagttatgattgttcaagaagtttgtaatttaaaaaaaggaccactatgtacttaccgtaactgaaaagtctttcgttttctcaactttatatatcttccggaaaggac

SEQ ID NO: 7167 - DNA, 224 bp, synthetic construct
  misc_feature 1..224: note = promoter
  source 1..224: mol_type = other DNA
gagggcctatttcccatggtcatatttgcatagaggatgcaagactgtcagagggacgattgcaattaacttggccataaacacaaacctattggcacaaactatgtgatatagaaagttatgattgttcaagaagtttgtaatttaaaaaaaggaccactatgtacttaccgtaactgaaaagtctttcgttttctcaactttatatatcttccggaaaggac

SEQ ID NO: 7168 - DNA, 224 bp, synthetic construct; identical to SEQ ID NO: 7167
  misc_feature 1..224: note = promoter
  source 1..224: mol_type = other DNA

SEQ ID NO: 7169 - DNA, 224 bp, synthetic construct
  misc_feature 1..224: note = promoter
  source 1..224: mol_type = other DNA
gagggcctatttcccatggttatatttgcatagaggatgcaagactgtcagagggacgattgcaattaacttggccataaacacaaacctattggcacaaactatgtgatatagaaagttatgattgttcaagaagtttgtaatttaaaaaaaggaccactatgtacttaccgtaactgaaaagtctttcgttttctcaactttatatatcttccggaaaggac

SEQ ID NO: 7170 - DNA, 224 bp, synthetic construct
  misc_feature 1..224: note = promoter
  source 1..224: mol_type = other DNA
gagggcctatttcccatggttctatttgcatagaggatgcaagactgtcagagggacgattgcaattaacttggccataaacacaaacctattggcacaaactatgtgatatagaaagttatgattgttcaagaagtttgtaatttaaaaaaaggaccactatgtacttaccgtaactgaaaagtctttcgttttctcaactttatatatcttccggaaaggac

SEQ ID NO: 7171 - DNA, 224 bp, synthetic construct
  misc_feature 1..224: note = promoter
  source 1..224: mol_type = other DNA
gagggcctatttcccatggttccatttgcatagaggatgcaagactgtcagagggacgattgcaattaacttggccataaacacaaacctattggcacaaactatgtgatatagaaagttatgattgttcaagaagtttgtaatttaaaaaaaggaccactatgtacttaccgtaactgaaaagtctttcgttttctcaactttatatatcttccggaaaggac

SEQ ID NO: 7172 - DNA, 224 bp, synthetic construct
  misc_feature 1..224: note = promoter
  source 1..224: mol_type = other DNA
gagggcctatttcccatggttccttttgcatagaggatgcaagactgtcagagggacgattgcaattaacttggccataaacacaaacctattggcacaaactatgtgatatagaaagttatgattgttcaagaagtttgtaatttaaaaaaaggaccactatgtacttaccgtaactgaaaagtctttcgttttctcaactttatatatcttccggaaaggac

SEQ ID NO: 7173 - DNA, 224 bp, synthetic construct; identical to SEQ ID NO: 7172
  misc_feature 1..224: note = promoter
  source 1..224: mol_type = other DNA

SEQ ID NO: 7174 - DNA, 224 bp, synthetic construct
  misc_feature 1..224: note = promoter
  source 1..224: mol_type = other DNA
gagggcctatttcccatggttccttctgcatagaggatgcaagactgtcagagggacgattgcaattaacttggccataaacacaaacctattggcacaaactatgtgatatagaaagttatgattgttcaagaagtttgtaatttaaaaaaaggaccactatgtacttaccgtaactgaaaagtctttcgttttctcaactttatatatcttccggaaaggac

SEQ ID NO: 7175 - DNA, 224 bp, synthetic construct
  misc_feature 1..224: note = promoter
  source 1..224: mol_type = other DNA
gagggcctatttcccatggttccttcagcatagaggatgcaagactgtcagagggacgattgcaattaacttggccataaacacaaacctattggcacaaactatgtgatatagaaagttatgattgttcaagaagtttgtaatttaaaaaaaggaccactatgtacttaccgtaactgaaaagtctttcgttttctcaactttatatatcttccggaaaggac

SEQ ID NO: 7176 - DNA, 224 bp, synthetic construct
  misc_feature 1..224: note = promoter
  source 1..224: mol_type = other DNA
gagggcctatttcccatggttccttcatcatagaggatgcaagactgtcagagggacgattgcaattaacttggccataaacacaaacctattggcacaaactatgtgatatagaaagttatgattgttcaagaagtttgtaatttaaaaaaaggaccactatgtacttaccgtaactgaaaagtctttcgttttctcaactttatatatcttccggaaaggac

SEQ ID NO: 7177 - DNA, 224 bp, synthetic construct
  misc_feature 1..224: note = promoter
  source 1..224: mol_type = other DNA
gagggcctatttcccatggttccttcataatagaggatgcaagactgtcagagggacgattgcaattaacttggccataaacacaaacctattggcacaaactatgtgatatagaaagttatgattgttcaagaagtttgtaatttaaaaaaaggaccactatgtacttaccgtaactgaaaagtctttcgttttctcaactttatatatcttccggaaaggac

SEQ ID NO: 7178 - DNA, 224 bp, synthetic construct
  misc_feature 1..224: note = promoter
  source 1..224: mol_type = other DNA
gagggcctatttcccatggttccttcatattagaggatgcaagactgtcagagggacgattgcaattaacttggccataaacacaaacctattggcacaaactatgtgatatagaaagttatgattgttcaagaagtttgtaatttaaaaaaaggaccactatgtacttaccgtaactgaaaagtctttcgttttctcaactttatatatcttccggaaaggac

SEQ ID NO: 7179 - DNA, 224 bp, synthetic construct; identical to SEQ ID NO: 7178
  misc_feature 1..224: note = promoter
  source 1..224: mol_type = other DNA

SEQ ID NO: 7180 - DNA, 224 bp, synthetic construct
  misc_feature 1..224: note = promoter
  source 1..224: mol_type = other DNA
gagggcctatttcccatggttccttcatatttgaggatgcaagactgtcagagggacgattgcaattaacttggccataaacacaaacctattggcacaaactatgtgatatagaaagttatgattgttcaagaagtttgtaatttaaaaaaaggaccactatgtacttaccgtaactgaaaagtctttcgttttctcaactttatatatcttccggaaaggac

SEQ ID NO: 7181 - DNA, 224 bp, synthetic construct; identical to SEQ ID NO: 7180
  misc_feature 1..224: note = promoter
  source 1..224: mol_type = other DNA

SEQ ID NO: 7182 - DNA, 224 bp, synthetic construct
  misc_feature 1..224: note = promoter
  source 1..224: mol_type = other DNA
gagggcctatttcccatggttccttcatatttgcggatgcaagactgtcagagggacgattgcaattaacttggccataaacacaaacctattggcacaaactatgtgatatagaaagttatgattgttcaagaagtttgtaatttaaaaaaaggaccactatgtacttaccgtaactgaaaagtctttcgttttctcaactttatatatcttccggaaaggac

SEQ ID NO: 7183 - DNA, 224 bp, synthetic construct
  misc_feature 1..224: note = promoter
  source 1..224: mol_type = other DNA
gagggcctatttcccatggttccttcatatttgcagatgcaagactgtcagagggacgattgcaattaacttggccataaacacaaacctattggcacaaactatgtgatatagaaagttatgattgttcaagaagtttgtaatttaaaaaaaggaccactatgtacttaccgtaactgaaaagtctttcgttttctcaactttatatatcttccggaaaggac

SEQ ID NO: 7184 - DNA, 224 bp, synthetic construct
  misc_feature 1..224: note = promoter
  source 1..224: mol_type = other DNA
gagggcctatttcccatggttccttcatatttgcatatgcaagactgtcagagggacgattgcaattaacttggccataaacacaaacctattggcacaaactatgtgatatagaaagttatgattgttcaagaagtttgtaatttaaaaaaaggaccactatgtacttaccgtaactgaaaagtctttcgttttctcaactttatatatcttccggaaaggac

SEQ ID NO: 7185 - DNA, 224 bp, synthetic construct; identical to SEQ ID NO: 7184
  misc_feature 1..224: note = promoter
  source 1..224: mol_type = other DNA

SEQ ID NO: 7186 - DNA, 224 bp, synthetic construct
  misc_feature 1..224: note = promoter
  source 1..224: mol_type = other DNA
gagggcctatttcccatggttccttcatatttgcataggcaagactgtcagagggacgattgcaattaacttggccataaacacaaacctattggcacaaactatgtgatatagaaagttatgattgttcaagaagtttgtaatttaaaaaaaggaccactatgtacttaccgtaactgaaaagtctttcgttttctcaactttatatatcttccggaaaggac

SEQ ID NO: 7187 - DNA, 224 bp, synthetic construct
  misc_feature 1..224: note = promoter
  source 1..224: mol_type = other DNA
gagggcctatttcccatggttccttcatatttgcatagacaagactgtcagagggacgattgcaattaacttggccataaacacaaacctattggcacaaactatgtgatatagaaagttatgattgttcaagaagtttgtaatttaaaaaaaggaccactatgtacttaccgtaactgaaaagtctttcgttttctcaactttatatatcttccggaaaggac

SEQ ID NO: 7188 - DNA, 224 bp, synthetic construct
  misc_feature 1..224: note = promoter
  source 1..224: mol_type = other DNA
gagggcctatttcccatggttccttcatatttgcatagagaagactgtcagagggacgattgcaattaacttggccataaacacaaacctattggcacaaactatgtgatatagaaagttatgattgttcaagaagtttgtaatttaaaaaaaggaccactatgtacttaccgtaactgaaaagtctttcgttttctcaactttatatatcttccggaaaggac

SEQ ID NO: 7189 - DNA, 224 bp, synthetic construct
  misc_feature 1..224: note = promoter
  source 1..224: mol_type = other DNA
gagggcctatttcccatggttccttcatatttgcatagaggagactgtcagagggacgattgcaattaacttggccataaacacaaacctattggcacaaactatgtgatatagaaagttatgattgttcaagaagtttgtaatttaaaaaaaggaccactatgtacttaccgtaactgaaaagtctttcgttttctcaactttatatatcttccggaaaggac

SEQ ID NO: 7190 - DNA, 224 bp, synthetic construct; identical to SEQ ID NO: 7189
  misc_feature 1..224: note = promoter
  source 1..224: mol_type = other DNA

SEQ ID NO: 7191 - DNA, 224 bp, synthetic construct
  misc_feature 1..224: note = promoter
  source 1..224: mol_type = other DNA
gagggcctatttcccatggttccttcatatttgcatagaggatactgtcagagggacgattgcaattaacttggccataaacacaaacctattggcacaaactatgtgatatagaaagttatgattgttcaagaagtttgtaatttaaaaaaaggaccactatgtacttaccgtaactgaaaagtctttcgttttctcaactttatatatcttccggaaaggac

SEQ ID NO: 7192 - DNA, 224 bp, synthetic construct
  misc_feature 1..224: note = promoter
  source 1..224: mol_type = other DNA
gagggcctatttcccatggttccttcatatttgcatagaggatgctgtcagagggacgattgcaattaacttggccataaacacaaacctattggcacaaactatgtgatatagaaagttatgattgttcaagaagtttgtaatttaaaaaaaggaccactatgtacttaccgtaactgaaaagtctttcgttttctcaactttatatatcttccggaaaggac

SEQ ID NO: 7193 - DNA, 224 bp, synthetic construct; identical to SEQ ID NO: 7192
  misc_feature 1..224: note = promoter
  source 1..224: mol_type = other DNA

SEQ ID NO: 7194 - DNA, 224 bp, synthetic construct
  misc_feature 1..224: note = promoter
  source 1..224: mol_type = other DNA
gagggcctatttcccatggttccttcatatttgcatagaggatgcagtcagagggacgattgcaattaacttggccataaacacaaacctattggcacaaactatgtgatatagaaagttatgattgttcaagaagtttgtaatttaaaaaaaggaccactatgtacttaccgtaactgaaaagtctttcgttttctcaactttatatatcttccggaaaggac

SEQ ID NO: 7195 - DNA, 224 bp, synthetic construct
  misc_feature 1..224: note = promoter
  source 1..224: mol_type = other DNA
gagggcctatttcccatggttccttcatatttgcatagaggatgcaatcagagggacgattgcaattaacttggccataaacacaaacctattggcacaaactatgtgatatagaaagttatgattgttcaagaagtttgtaatttaaaaaaaggaccactatgtacttaccgtaactgaaaagtctttcgttttctcaactttatatatcttccggaaaggac

SEQ ID NO: 7196 - DNA, 224 bp, synthetic construct
  misc_feature 1..224: note = promoter
  source 1..224: mol_type = other DNA
gagggcctatttcccatggttccttcatatttgcatagaggatgcaagcagagggacgattgcaattaacttggccataaacacaaacctattggcacaaactatgtgatatagaaagttatgattgttcaagaagtttgtaatttaaaaaaaggaccactatgtacttaccgtaactgaaaagtctttcgttttctcaactttatatatcttccggaaaggac

SEQ ID NO: 7197 - DNA, 224 bp, synthetic construct
  misc_feature 1..224: note = promoter
  source 1..224: mol_type = other DNA
gagggcctatttcccatggttccttcatatttgcatagaggatgcaagaagagggacgattgcaattaacttggccataaacacaaacctattggcacaaactatgtgatatagaaagttatgattgttcaagaagtttgtaatttaaaaaaaggaccactatgtacttaccgtaactgaaaagtctttcgttttctcaactttatatatcttccggaaaggac

SEQ ID NO: 7198 - DNA, 224 bp, synthetic construct
  misc_feature 1..224: note = promoter
  source 1..224: mol_type = other DNA
gagggcctatttcccatggttccttcatatttgcatagaggatgcaagacgagggacgattgcaattaacttggccataaacacaaacctattggcacaaactatgtgatatagaaagttatgattgttcaagaagtttgtaatttaaaaaaaggaccactatgtacttaccgtaactgaaaagtctttcgttttctcaactttatatatcttccggaaaggac

SEQ ID NO: 7199 - DNA, 224 bp, synthetic construct
  misc_feature 1..224: note = promoter
  source 1..224: mol_type = other DNA
gagggcctatttcccatggttccttcatatttgcatagaggatgcaagactagggacgattgcaattaacttggccataaacacaaacctattggcacaaactatgtgatatagaaagttatgattgttcaagaagtttgtaatttaaaaaaaggaccactatgtacttaccgtaactgaaaagtctttcgttttctcaactttatatatcttccggaaaggac

SEQ ID NO: 7200 - DNA, 224 bp, synthetic construct
  misc_feature 1..224: note = promoter
  source 1..224: mol_type = other DNA
gagggcctatttcccatggttccttcatatttgcatagaggatgcaagactggggacgattgcaattaacttggccataaacacaaacctattggcacaaactatgtgatatagaaagttatgattgttcaagaagtttgtaatttaaaaaaaggaccactatgtacttaccgtaactgaaaagtctttcgttttctcaactttatatatcttccggaaaggac

SEQ ID NO: 7201 - DNA, 224 bp, synthetic construct
  misc_feature 1..224: note = promoter
  source 1..224: mol_type = other DNA
gagggcctatttcccatggttccttcatatttgcatagaggatgcaagactgtggacgattgcaattaacttggccataaacacaaacctattggcacaaactatgtgatatagaaagttatgattgttcaagaagtttgtaatttaaaaaaaggaccactatgtacttaccgtaactgaaaagtctttcgttttctcaactttatatatcttccggaaaggac

SEQ ID NO: 7202 - DNA, 224 bp, synthetic construct
  misc_feature 1..224: note = promoter
  source 1..224: mol_type = other DNA
gagggcctatttcccatggttccttcatatttgcatagaggatgcaagactgtcgacgattgcaattaacttggccataaacacaaacctattggcacaaactatgtgatatagaaagttatgattgttcaagaagtttgtaatttaaaaaaaggaccactatgtacttaccgtaactgaaaagtctttcgttttctcaactttatatatcttccggaaaggac

SEQ ID NO: 7203 - DNA, 224 bp, synthetic construct
  misc_feature 1..224: note = promoter
  source 1..224: mol_type = other DNA
gagggcctatttcccatggttccttcatatttgcatagaggatgcaagactgtcaacgattgcaattaacttggccataaacacaaacctattggcacaaactatgtgatatagaaagttatgattgttcaagaagtttgtaatttaaaaaaaggaccactatgtacttaccgtaactgaaaagtctttcgttttctcaactttatatatcttccggaaaggac

SEQ ID NO: 7204 - DNA, 224 bp, synthetic construct
  misc_feature 1..224: note = promoter
  source 1..224: mol_type = other DNA
gagggcctatttcccatggttccttcatatttgcatagaggatgcaagactgtcagcgattgcaattaacttggccataaacacaaacctattggcacaaactatgtgatatagaaagttatgattgttcaagaagtttgtaatttaaaaaaaggaccactatgtacttaccgtaactgaaaagtctttcgttttctcaactttatatatcttccggaaaggac

SEQ ID NO: 7205 - DNA, 224 bp, synthetic construct
  misc_feature 1..224: note = promoter
  source 1..224: mol_type = other DNA
gagggcctatttcccatggttccttcatatttgcatagaggatgcaagactgtcagagattgcaattaacttggccataaacacaaacctattggcacaaactatgtgatatagaaagttatgattgttcaagaagtttgtaatttaaaaaaaggaccactatgtacttaccgtaactgaaaagtctttcgttttctcaactttatatatcttccggaaaggac

SEQ ID NO: 7206 - DNA, 224 bp, synthetic construct; identical to SEQ ID NO: 7205
  misc_feature 1..224: note = promoter
  source 1..224: mol_type = other DNA

SEQ ID NO: 7207 - DNA, 224 bp, synthetic construct
  misc_feature 1..224: note = promoter
  source 1..224: mol_type = other DNA
gagggcctatttcccatggttccttcatatttgcatagaggatgcaagactgtcagaggttgcaattaacttggccataaacacaaacctattggcacaaactatgtgatatagaaagttatgattgttcaagaagtttgtaatttaaaaaaaggaccactatgtacttaccgtaactgaaaagtctttcgttttctcaactttatatatcttccggaaaggac

SEQ ID NO: 7208 - DNA, 224 bp, synthetic construct
  misc_feature 1..224: note = promoter
  source 1..224: mol_type = other DNA
gagggcctatttcccatggttccttcatatttgcatagaggatgcaagactgtcagagggtgcaattaacttggccataaacacaaacctattggcacaaactatgtgatatagaaagttatgattgttcaagaagtttgtaatttaaaaaaaggaccactatgtacttaccgtaactgaaaagtctttcgttttctcaactttatatatcttccggaaaggac

SEQ ID NO: 7209 - DNA, 224 bp, synthetic construct
  misc_feature 1..224: note = promoter
  source 1..224: mol_type = other DNA
gagggcctatttcccatggttccttcatatttgcatagaggatgcaagactgtcagagggagcaattaacttggccataaacacaaacctattggcacaaactatgtgatatagaaagttatgattgttcaagaagtttgtaatttaaaaaaaggaccactatgtacttaccgtaactgaaaagtctttcgttttctcaactttatatatcttccggaaaggac

SEQ ID NO: 7210 - DNA, 224 bp, synthetic construct
  misc_feature 1..224: note = promoter
  source 1..224: mol_type = other DNA
gagggcctatttcccatggttccttcatatttgcatagaggatgcaagactgtcagagggaccaattaacttggccataaacacaaacctattggcacaaactatgtgatatagaaagttatgattgttcaagaagtttgtaatttaaaaaaaggaccactatgtacttaccgtaactgaaaagtctttcgttttctcaactttatatatcttccggaaaggac

SEQ ID NO: 7211 - DNA, 224 bp, synthetic construct
  misc_feature 1..224: note = promoter
  source 1..224: mol_type = other DNA
gagggcctatttcccatggttccttcatatttgcatagaggatgcaagactgtcagagggacgaattaacttggccataaacacaaacctattggcacaaactatgtgatatagaaagttatgattgttcaagaagtttgtaatttaaaaaaaggaccactatgtacttaccgtaactgaaaagtctttcgttttctcaactttatatatcttccggaaaggac

SEQ ID NO: 7212 - DNA, 224 bp, synthetic construct; identical to SEQ ID NO: 7211
  misc_feature 1..224: note = promoter
  source 1..224: mol_type = other DNA

SEQ ID NO: 7213 - DNA, 224 bp, synthetic construct
  misc_feature 1..224: note = promoter
  source 1..224: mol_type = other DNA
gagggcctatttcccatggttccttcatatttgcatagaggatgcaagactgtcagagggacgatttaacttggccataaacacaaacctattggcacaaactatgtgatatagaaagttatgattgttcaagaagtttgtaatttaaaaaaaggaccactatgtacttaccgtaactgaaaagtctttcgttttctcaactttatatatcttccggaaaggac

SEQ ID NO: 7214 - DNA, 224 bp, synthetic construct; identical to SEQ ID NO: 7213
  misc_feature 1..224: note = promoter
  source 1..224: mol_type = other DNA

SEQ ID NO: 7215 - DNA, 224 bp, synthetic construct
  misc_feature 1..224: note = promoter
  source 1..224: mol_type = other DNA
gagggcctatttcccatggttccttcatatttgcatagaggatgcaagactgtcagagggacgattgaacttggccataaacacaaacctattggcacaaactatgtgatatagaaagttatgattgttcaagaagtttgtaatttaaaaaaaggaccactatgtacttaccgtaactgaaaagtctttcgttttctcaactttatatatcttccggaaaggac

SEQ ID NO: 7216 - DNA, 224 bp, synthetic construct
  misc_feature 1..224: note = promoter
  source 1..224: mol_type = other DNA
gagggcctatttcccatggttccttcatatttgcatagaggatgcaagactgtcagagggacgattgcacttggccataaacacaaacctattggcacaaactatgtgatatagaaagttatgattgttcaagaagtttgtaatttaaaaaaaggaccactatgtacttaccgtaactgaaaagtctttcgttttctcaactttatatatcttccggaaaggac

SEQ ID NO: 7217 - DNA, 224 bp, synthetic construct; identical to SEQ ID NO: 7216
  misc_feature 1..224: note = promoter
  source 1..224: mol_type = other DNA

SEQ ID NO: 7218 - DNA, 224 bp, synthetic construct
  misc_feature 1..224: note = promoter
  source 1..224: mol_type = other DNA
gagggcctatttcccatggttccttcatatttgcatagaggatgcaagactgtcagagggacgattgcaattggccataaacacaaacctattggcacaaactatgtgatatagaaagttatgattgttcaagaagtttgtaatttaaaaaaaggaccactatgtacttaccgtaactgaaaagtctttcgttttctcaactttatatatcttccggaaaggac

SEQ ID NO: 7219 - DNA, 224 bp, synthetic construct; identical to SEQ ID NO: 7218
  misc_feature 1..224: note = promoter
  source 1..224: mol_type = other DNA

SEQ ID NO: 7220 - DNA, 224 bp, synthetic construct; identical to SEQ ID NO: 7218
  misc_feature 1..224: note = promoter
  source 1..224: mol_type = other DNA

SEQ ID NO: 7221 - DNA, 224 bp, synthetic construct
  misc_feature 1..224: note = promoter
  source 1..224: mol_type = other DNA
gagggcctatttcccatggttccttcatatttgcatagaggatgcaagactgtcagagggacgattgcaattagccataaacacaaacctattggcacaaactatgtgatatagaaagttatgattgttcaagaagtttgtaatttaaaaaaaggaccactatgtacttaccgtaactgaaaagtctttcgttttctcaactttatatatcttccggaaaggac

SEQ ID NO: 7222 - DNA, 224 bp, synthetic construct
  misc_feature 1..224: note = promoter
  source 1..224: mol_type = other DNA
gagggcctatttcccatggttccttcatatttgcatagaggatgcaagactgtcagagggacgattgcaattaaccataaacacaaacctattggcacaaactatgtgatatagaaagttatgattgttcaagaagtttgtaatttaaaaaaaggaccactatgtacttaccgtaactgaaaagtctttcgttttctcaactttatatatcttccggaaaggac

SEQ ID NO: 7223 - DNA, 224 bp, synthetic construct; identical to SEQ ID NO: 7222
  misc_feature 1..224: note = promoter
  source 1..224: mol_type = other DNA

SEQ ID NO: 7224 - DNA, 224 bp, synthetic construct
  misc_feature 1..224: note = promoter
  source 1..224: mol_type = other DNA
gagggcctatttcccatggttccttcatatttgcatagaggatgcaagactgtcagagggacgattgcaattaactataaacacaaacctattggcacaaactatgtgatatagaaagttatgattgttcaagaagtttgtaatttaaaaaaaggaccactatgtacttaccgtaactgaaaagtctttcgttttctcaactttatatatcttccggaaaggac

SEQ ID NO: 7225 - DNA, 224 bp, synthetic construct
  misc_feature 1..224: note = promoter
  source 1..224: mol_type = other DNA
gagggcctatttcccatggttccttcatatttgcatagaggatgcaagactgtcagagggacgattgcaattaactttaaacacaaacctattggcacaaactatgtgatatagaaagttatgattgttcaagaagtttgtaatttaaaaaaaggaccactatgtacttaccgtaactgaaaagtctttcgttttctcaactttatatatcttccggaaaggac

SEQ ID NO: 7226 - DNA, 224 bp, synthetic construct
  misc_feature 1..224: note = promoter
  source 1..224: mol_type = other DNA
gagggcctatttcccatggttccttcatatttgcatagaggatgcaagactgtcagagggacgattgcaattaacttgaaacacaaacctattggcacaaactatgtgatatagaaagttatgattgttcaagaagtttgtaatttaaaaaaaggaccactatgtacttaccgtaactgaaaagtctttcgttttctcaactttatatatcttccggaaaggac

SEQ ID NO: 7227 - DNA, 224 bp, synthetic construct
  misc_feature 1..224: note = promoter
  source 1..224: mol_type = other DNA
gagggcctatttcccatggttccttcatatttgcatagaggatgcaagactgtcagagggacgattgcaattaacttggaacacaaacctattggcacaaactatgtgatatagaaagttatgattgttcaagaagtttgtaatttaaaaaaaggaccactatgtacttaccgtaactgaaaagtctttcgttttctcaactttatatatcttccggaaaggac

SEQ ID NO: 7228 - DNA, 224 bp, synthetic construct
  misc_feature 1..224: note = promoter
  source 1..224: mol_type = other DNA
gagggcctatttcccatggttccttcatatttgcatagaggatgcaagactgtcagagggacgattgcaattaacttggcacacaaacctattggcacaaactatgtgatatagaaagttatgattgttcaagaagtttgtaatttaaaaaaaggaccactatgtacttaccgtaactgaaaagtctttcgttttctcaactttatatatcttccggaaaggac

SEQ ID NO: 7229 - DNA, 224 bp, synthetic construct
  misc_feature 1..224: note = promoter
  source 1..224: mol_type = other DNA
gagggcctatttcccatggttccttcatatttgcatagaggatgcaagactgtcagagggacgattgcaattaacttggcccacaaacctattggcacaaactatgtgatatagaaagttatgattgttcaagaagtttgtaatttaaaaaaaggaccactatgtacttaccgtaactgaaaagtctttcgttttctcaactttatatatcttccggaaaggac

SEQ ID NO: 7230 - DNA, 224 bp, synthetic construct
  misc_feature 1..224: note = promoter
  source 1..224: mol_type = other DNA
gagggcctatttcccatggttccttcatatttgcatagaggatgcaagactgtcagagggacgattgcaattaacttggccaacaaacctattggcacaaactatgtgatatagaaagttatgattgttcaagaagtttgtaatttaaaaaaaggaccactatgtacttaccgtaactgaaaagtctttcgttttctcaactttatatatcttccggaaaggac

SEQ ID NO: 7231 - DNA, 224 bp, synthetic construct
  misc_feature 1..224: note = promoter
  source 1..224: mol_type = other DNA
gagggcctatttcccatggttccttcatatttgcatagaggatgcaagactgtcagagggacgattgcaattaacttggccatcaaacctattggcacaaactatgtgatatagaaagttatgattgttcaagaagtttgtaatttaaaaaaaggaccactatgtacttaccgtaactgaaaagtctttcgttttctcaactttatatatcttccggaaaggac

SEQ ID NO: 7232 - DNA, 224 bp, synthetic construct
  misc_feature 1..224: note = promoter
  source 1..224: mol_type = other DNA
gagggcctatttcccatggttccttcatatttgcatagaggatgcaagactgtcagagggacgattgcaattaacttggccataaaacctattggcacaaactatgtgatatagaaagttatgattgttcaagaagtttgtaatttaaaaaaaggaccactatgtacttaccgtaactgaaaagtctttcgttttctcaactttatatatcttccggaaaggac

SEQ ID NO: 7233 - DNA, 224 bp, synthetic construct; identical to SEQ ID NO: 7232
  misc_feature 1..224: note = promoter
  source 1..224: mol_type = other DNA

SEQ ID NO: 7234 - DNA, 224 bp, synthetic construct; identical to SEQ ID NO: 7232
  misc_feature 1..224: note = promoter
  source 1..224: mol_type = other DNA

SEQ ID NO: 7235 - DNA, 224 bp, synthetic construct
  misc_feature 1..224: note = promoter
  source 1..224: mol_type = other DNA
gagggcctatttcccatggttccttcatatttgcatagaggatgcaagactgtcagagggacgattgcaattaacttggccataaaccctattggcacaaactatgtgatatagaaagttatgattgttcaagaagtttgtaatttaaaaaaaggaccactatgtacttaccgtaactgaaaagtctttcgttttctcaactttatatatcttccggaaaggac

SEQ ID NO: 7236 - DNA, 224 bp, synthetic construct
  misc_feature 1..224: note = promoter
  source 1..224: mol_type = other DNA
gagggcctatttcccatggttccttcatatttgcatagaggatgcaagactgtcagagggacgattgcaattaacttggccataaacactattggcacaaactatgtgatatagaaagttatgattgttcaagaagtttgtaatttaaaaaaaggaccactatgtacttaccgtaactgaaaagtctttcgttttctcaactttatatatcttccggaaaggac

SEQ ID NO: 7237 - DNA, 224 bp, synthetic construct; identical to SEQ ID NO: 7236
  misc_feature 1..224: note = promoter
  source 1..224: mol_type = other DNA

SEQ ID NO: 7238 - DNA, 224 bp, synthetic construct
  misc_feature 1..224: note = promoter
  source 1..224: mol_type = other DNA
gagggcctatttcccatggttccttcatatttgcatagaggatgcaagactgtcagagggacgattgcaattaacttggccataaacacaattggcacaaactatgtgatatagaaagttatgattgttcaagaagtttgtaatttaaaaaaaggaccactatgtacttaccgtaactgaaaagtctttcgttttctcaactttatatatcttccggaaaggac

SEQ ID NO: 7239 - DNA, 224 bp, synthetic construct; identical to SEQ ID NO: 7238
  misc_feature 1..224: note = promoter
  source 1..224: mol_type = other DNA

SEQ ID NO: 7240 - DNA, 224 bp, synthetic construct
  misc_feature 1..224: note = promoter
  source 1..224: mol_type = other DNA
gagggcctatttcccatggttccttcatatttgcatagaggatgcaagactgtcagagggacgattgcaattaacttggccataaacacaaatggcacaaactatgtgatatagaaagttatgattgttcaagaagtttgtaatttaaaaaaaggaccactatgtacttaccgtaactgaaaagtctttcgttttctcaactttatatatcttccggaaaggac

SEQ ID NO: 7241 - DNA, 224 bp, synthetic construct
  misc_feature 1..224: note = promoter
  source 1..224: mol_type = other DNA
gagggcctatttcccatggttccttcatatttgcatagaggatgcaagactgtcagagggacgattgcaattaacttggccataaacacaaacggcacaaactatgtgatatagaaagttatgattgttcaagaagtttgtaatttaaaaaaaggaccactatgtacttaccgtaactgaaaagtctttcgttttctcaactttatatatcttccggaaaggac

SEQ ID NO: 7242 - DNA, 224 bp, synthetic construct
  misc_feature 1..224: note = promoter
  source 1..224: mol_type = other DNA
gagggcctatttcccatggttccttcatatttgcatagaggatgcaagactgtcagagggacgattgcaattaacttggccataaacacaaaccgcacaaactatgtgatatagaaagttatgattgttcaagaagtttgtaatttaaaaaaaggaccactatgtacttaccgtaactgaaaagtctttcgttttctcaactttatatatcttccggaaaggac

SEQ ID NO: 7243 - DNA, 224 bp, synthetic construct
  misc_feature 1..224: note = promoter
  source 1..224: mol_type = other DNA
gagggcctatttcccatggttccttcatatttgcatagaggatgcaagactgtcagagggacgattgcaattaacttggccataaacacaaacctcacaaactatgtgatatagaaagttatgattgttcaagaagtttgtaatttaaaaaaaggaccactatgtacttaccgtaactgaaaagtctttcgttttctcaactttatatatcttccggaaaggac

SEQ ID NO: 7244 - DNA, 224 bp, synthetic construct
  misc_feature 1..224: note = promoter
  source 1..224: mol_type = other DNA
gagggcctatttcccatggttccttcatatttgcatagaggatgcaagactgtcagagggacgattgcaattaacttggccataaacacaaacctaacaaactatgtgatatagaaagttatgattgttcaagaagtttgtaatttaaaaaaaggaccactatgtacttaccgtaactgaaaagtctttcgttttctcaactttatatatcttccggaaaggac

SEQ ID NO: 7245 - DNA, 224 bp, synthetic construct
  misc_feature 1..224: note = promoter
  source 1..224: mol_type = other DNA
gagggcctatttcccatggttccttcatatttgcatagaggatgcaagactgtcagagggacgattgcaattaacttggccataaacacaaacctatcaaactatgtgatatagaaagttatgattgttcaagaagtttgtaatttaaaaaaaggaccactatgtacttaccgtaactgaaaagtctttcgttttctcaactttatatatcttccggaaaggac

SEQ ID NO: 7246 - DNA, 224 bp, synthetic construct
  misc_feature 1..224: note = promoter
  source 1..224: mol_type = other DNA
gagggcctatttcccatggttccttcatatttgcatagaggatgcaagactgtcagagggacgattgcaattaacttggccataaacacaaacctattaaactatgtgatatagaaagttatgattgttcaagaagtttgtaatttaaaaaaaggaccactatgtacttaccgtaactgaaaagtctttcgttttctcaactttatatatcttccggaaaggac

SEQ ID NO: 7247 - DNA, 224 bp, synthetic construct
  misc_feature 1..224: note = promoter
  source 1..224: mol_type = other DNA
gagggcctatttcccatggttccttcatatttgcatagaggatgcaagactgtcagagggacgattgcaattaacttggccataaacacaaacctattgaactatgtgatatagaaagttatgattgttcaagaagtttgtaatttaaaaaaaggaccactatgtacttaccgtaactgaaaagtctttcgttttctcaactttatatatcttccggaaaggac

SEQ ID NO: 7248 - DNA, 224 bp, synthetic construct
  misc_feature 1..224: note = promoter
  source 1..224: mol_type = other DNA
gagggcctatttcccatggttccttcatatttgcatagaggatgcaagactgtcagagggacgattgcaattaacttggccataaacacaaacctattggactatgtgatatagaaagttatgattgttcaagaagtttgtaatttaaaaaaaggaccactatgtacttaccgtaactgaaaagtctttcgttttctcaactttatatatcttccggaaaggac

SEQ ID NO: 7249 - DNA, 224 bp, synthetic construct
  misc_feature 1..224: note = promoter
  source 1..224: mol_type = other DNA
gagggcctatttcccatggttccttcatatttgcatagaggatgcaagactgtcagagggacgattgcaattaacttggccataaacacaaacctattggcctatgtgatatagaaagttatgattgttcaagaagtttgtaatttaaaaaaaggaccactatgtacttaccgtaactgaaaagtctttcgttttctcaactttatatatcttccggaaaggac

SEQ ID NO: 7250 - DNA, 224 bp, synthetic construct
  misc_feature 1..224: note = promoter
  source 1..224: mol_type = other DNA
gagggcctatttcccatggttccttcatatttgcatagaggatgcaagactgtcagagggacgattgcaattaacttggccataaacacaaacctattggcatatgtgatatagaaagttatgattgttcaagaagtttgtaatttaaaaaaaggaccactatgtacttaccgtaactgaaaagtctttcgttttctcaactttatatatcttccggaaaggac

SEQ ID NO: 7251 - DNA, 224 bp, synthetic construct
  misc_feature 1..224: note = promoter
  source 1..224: mol_type = other DNA
gagggcctatttcccatggttccttcatatttgcatagaggatgcaagactgtcagagggacgattgcaattaacttggccataaacacaaacctattggcacatgtgatatagaaagttatgattgttcaagaagtttgtaatttaaaaaaaggaccactatgtacttaccgtaactgaaaagtctttcgttttctcaactttatatatcttccggaaaggac

SEQ ID NO: 7252 - DNA, 224 bp, synthetic construct; identical to SEQ ID NO: 7251
  misc_feature 1..224: note = promoter
  source 1..224: mol_type = other DNA

SEQ ID NO: 7253 - DNA, 224 bp, synthetic construct
  misc_feature 1..224: note = promoter
  source 1..224: mol_type = other DNA
gagggcctatttcccatggttccttcatatttgcatagaggatgcaagactgtcagagggacgattgcaattaacttggccataaacacaaacctattggcacaagtgatatagaaagttatgattgttcaagaagtttgtaatttaaaaaaaggaccactatgtacttaccgtaactgaaaagtctttcgttttctcaactttatatatcttccggaaaggac

SEQ ID NO: 7254 - DNA, 224 bp, synthetic construct
  misc_feature 1..224: note = promoter
  source 1..224: mol_type = other DNA
gagggcctatttcccatggttccttcatatttgcatagaggatgcaagactgtcagagggacgattgcaattaacttggccataaacacaaacctattggcacaaatgatatagaaagttatgattgttcaagaagtttgtaatttaaaaaaaggaccactatgtacttaccgtaactgaaaagtctttcgttttctcaactttatatatcttccggaaaggac

SEQ ID NO: 7255 - DNA, 224 bp, synthetic construct
  misc_feature 1..224: note = promoter
  source 1..224: mol_type = other DNA
gagggcctatttcccatggttccttcatatttgcatagaggatgcaagactgtcagagggacgattgcaattaacttggccataaacacaaacctattggcacaaacgatatagaaagttatgattgttcaagaagtttgtaatttaaaaaaaggaccactatgtacttaccgtaactgaaaagtctttcgttttctcaactttatatatcttccggaaaggac

SEQ ID NO: 7256 - DNA, 224 bp, synthetic construct
  misc_feature 1..224: note = promoter
  source 1..224: mol_type = other DNA
gagggcctatttcccatggttccttcatatttgcatagaggatgcaagactgtcagagggacgattgcaattaacttggccataaacacaaacctattggcacaaactatatagaaagttatgattgttcaagaagtttgtaatttaaaaaaaggaccactatgtacttaccgtaactgaaaagtctttcgttttctcaactttatatatcttccggaaaggac

SEQ ID NO: 7257 - DNA, 224 bp, synthetic construct; identical to SEQ ID NO: 7256
  misc_feature 1..224: note = promoter
  source 1..224: mol_type = other DNA

SEQ ID NO: 7258 - DNA, 224 bp, synthetic construct; identical to SEQ ID NO: 7256
  misc_feature 1..224: note = promoter
  source 1..224: mol_type = other DNA

SEQ ID NO: 7259 - DNA, 224 bp, synthetic construct
  misc_feature 1..224: note = promoter
  source 1..224: mol_type = other DNA
gagggcctatttcccatggttccttcatatttgcatagaggatgcaagactgtcagagggacgattgcaattaacttggccataaacacaaacctattggcacaaactatgtagaaagttatgattgttcaagaagtttgtaatttaaaaaaaggaccactatgtacttaccgtaactgaaaagtctttcgttttctcaactttatatatcttccggaaaggac

SEQ ID NO: 7260 - DNA, 224 bp, synthetic construct; identical to SEQ ID NO: 7259
  misc_feature 1..224: note = promoter
  source 1..224: mol_type = other DNA

SEQ ID NO: 7261 - DNA, 224 bp, synthetic construct
  misc_feature 1..224: note = promoter
  source 1..224: mol_type = other DNA
gagggcctatttcccatggttccttcatatttgcatagaggatgcaagactgtcagagggacgattgcaattaacttggccataaacacaaacctattggcacaaactatgtggaaagttatgattgttcaagaagtttgtaatttaaaaaaaggaccactatgtacttaccgtaactgaaaagtctttcgttttctcaactttatatatcttccggaaaggac

SEQ ID NO: 7262 - DNA, 224 bp, synthetic construct
  misc_feature 1..224: note = promoter
  source 1..224: mol_type = other DNA
gagggcctatttcccatggttccttcatatttgcatagaggatgcaagactgtcagagggacgattgcaattaacttggccataaacacaaacctattggcacaaactatgtgaaaagttatgattgttcaagaagtttgtaatttaaaaaaaggaccactatgtacttaccgtaactgaaaagtctttcgttttctcaactttatatatcttccggaaaggac

SEQ ID NO: 7263 - DNA, 224 bp, synthetic construct
  misc_feature 1..224: note = promoter
  source 1..224: mol_type = other DNA
gagggcctatttcccatggttccttcatatttgcatagaggatgcaagactgtcagagggacgattgcaattaacttggccataaacacaaacctattggcacaaactatgtgataagttatgattgttcaagaagtttgtaatttaaaaaaaggaccactatgtacttaccgtaactgaaaagtctttcgttttctcaactttatatatcttccggaaaggac

SEQ ID NO: 7264 - DNA, 224 bp, synthetic construct; identical to SEQ ID NO: 7263
  misc_feature 1..224: note = promoter
  source 1..224: mol_type = other DNA

SEQ ID NO: 7265 - DNA, 224 bp, synthetic construct
  misc_feature 1..224: note = promoter
  source 1..224: mol_type = other DNA
gagggcctatttcccatggttccttcatatttgcatagaggatgcaagactgtcagagggacgattgcaattaacttggccataaacacaaacctattggcacaaactatgtgatatgttatgattgttcaagaagtttgtaatttaaaaaaaggaccactatgtacttaccgtaactgaaaagtctttcgttttctcaactttatatatcttccggaaaggac

SEQ ID NO: 7266 - DNA, 224 bp, synthetic construct
  misc_feature 1..224: note = promoter
  source 1..224: mol_type = other DNA
gagggcctatttcccatggttccttcatatttgcatagaggatgcaagactgtcagagggacgattgcaattaacttggccataaacacaaacctattggcacaaactatgtgatatattatgattgttcaagaagtttgtaatttaaaaaaaggaccactatgtacttaccgtaactgaaaagtctttcgttttctcaactttatatatcttccggaaaggac

SEQ ID NO: 7267 - DNA, 224 bp, synthetic construct
  misc_feature 1..224: note = promoter
  source 1..224: mol_type = other DNA
gagggcctatttcccatggttccttcatatttgcatagaggatgcaagactgtcagagggacgattgcaattaacttggccataaacacaaacctattggcacaaactatgtgatatagtatgattgttcaagaagtttgtaatttaaaaaaaggaccactatgtacttaccgtaactgaaaagtctttcgttttctcaactttatatatcttccggaaaggac

SEQ ID NO: 7268 - DNA, 224 bp, synthetic construct
  misc_feature 1..224: note = promoter
  source 1..224: mol_type = other DNA
gagggcctatttcccatggttccttcatatttgcatagaggatgcaagactgtcagagggacgattgcaattaacttggccataaacacaaacctattggcacaaactatgtgatatagaatgattgttcaagaagtttgtaatttaaaaaaaggaccactatgtacttaccgtaactgaaaagtctttcgttttctcaactttatatatcttccggaaaggac

SEQ ID NO: 7269 - DNA, 224 bp, synthetic construct; identical to SEQ ID NO: 7268
  misc_feature 1..224: note = promoter
  source 1..224: mol_type = other DNA

SEQ ID NO: 7270 - DNA, 224 bp, synthetic construct
  misc_feature 1..224: note = promoter
  source 1..224: mol_type = other DNA
gagggcctatttcccatggttccttcatatttgcatagaggatgcaagactgtcagagggacgattgcaattaacttggccataaacacaaacctattggcacaaactatgtgatatagaaagattgttcaagaagtttgtaatttaaaaaaaggaccactatgtacttaccgtaactgaaaagtctttcgttttctcaactttatatatcttccggaaaggac

SEQ ID NO: 7271 - DNA, 224 bp, synthetic construct; identical to SEQ ID NO: 7270
  misc_feature 1..224: note = promoter
  source 1..224: mol_type = other DNA

SEQ ID NO: 7272 - DNA, 224 bp, synthetic construct
  misc_feature 1..224: note = promoter
  source 1..224: mol_type = other DNA
gagggcctatttcccatggttccttcatatttgcatagaggatgcaagactgtcagagggacgattgcaattaacttggccataaacacaaacctattggcacaaactatgtgatatagaaagtttgttcaagaagtttgtaatttaaaaaaaggaccactatgtacttaccgtaactgaaaagtctttcgttttctcaactttatatatcttccggaaaggac

SEQ ID NO: 7273 - DNA, 224 bp, synthetic construct; identical to SEQ ID NO: 7272
  misc_feature 1..224: note = promoter
  source 1..224: mol_type = other DNA

SEQ ID NO: 7274 - DNA, 224 bp, synthetic construct
  misc_feature 1..224: note = promoter
  source 1..224: mol_type = other DNA
gagggcctatttcccatggttccttcatatttgcatagaggatgcaagactgtcagagggacgattgcaattaacttggccataaacacaaacctattggcacaaactatgtgatatagaaagttagttcaagaagtttgtaatttaaaaaaaggaccactatgtacttaccgtaactgaaaagtctttcgttttctcaactttatatatcttccggaaaggac

SEQ ID NO: 7275 - DNA, 224 bp, synthetic construct
  misc_feature 1..224: note = promoter
  source 1..224: mol_type = other DNA
gagggcctatttcccatggttccttcatatttgcatagaggatgcaagactgtcagagggacgattgcaattaacttggccataaacacaaacctattggcacaaactatgtgatatagaaagttatttcaagaagtttgtaatttaaaaaaaggaccactatgtacttaccgtaactgaaaagtctttcgttttctcaactttatatatcttccggaaaggac

SEQ ID NO: 7276 - DNA, 224 bp, synthetic construct
  misc_feature 1..224: note = promoter
  source 1..224: mol_type = other DNA
gagggcctatttcccatggttccttcatatttgcatagaggatgcaagactgtcagagggacgattgcaattaacttggccataaacacaaacctattggcacaaactatgtgatatagaaagttatgtcaagaagtttgtaatttaaaaaaaggaccactatgtacttaccgtaactgaaaagtctttcgttttctcaactttatatatcttccggaaaggac

SEQ ID NO: 7277 - DNA, 224 bp, synthetic construct
  misc_feature 1..224: note = promoter
  source 1..224: mol_type = other DNA
gagggcctatttcccatggttccttcatatttgcatagaggatgcaagactgtcagagggacgattgcaattaacttggccataaacacaaacctattggcacaaactatgtgatatagaaagttatgacaagaagtttgtaatttaaaaaaaggaccactatgtacttaccgtaactgaaaagtctttcgttttctcaactttatatatcttccggaaaggac

SEQ ID NO: 7278 - DNA, 224 bp, synthetic construct
  misc_feature 1..224: note = promoter
  source 1..224: mol_type = other DNA
gagggcctatttcccatggttccttcatatttgcatagaggatgcaagactgtcagagggacgattgcaattaacttggccataaacacaaacctattggcacaaactatgtgatatagaaagttatgataagaagtttgtaatttaaaaaaaggaccactatgtacttaccgtaactgaaaagtctttcgttttctcaactttatatatcttccggaaaggac

SEQ ID NO: 7279 - DNA, 224 bp, synthetic construct
  misc_feature 1..224: note = promoter
  source 1..224: mol_type = other DNA
gagggcctatttcccatggttccttcatatttgcatagaggatgcaagactgtcagagggacgattgcaattaacttggccataaacacaaacctattggcacaaactatgtgatatagaaagttatgattagaagtttgtaatttaaaaaaaggaccactatgtacttaccgtaactgaaaagtctttcgttttctcaactttatatatcttccggaaaggac

SEQ ID NO: 7280 - DNA, 224 bp, synthetic construct
  misc_feature 1..224: note = promoter
  source 1..224: mol_type = other DNA
gagggcctatttcccatggttccttcatatttgcatagaggatgcaagactgtcagagggacgattgcaattaacttggccataaacacaaacctattggcacaaactatgtgatatagaaagttatgattggaagtttgtaatttaaaaaaaggaccactatgtacttaccgtaactgaaaagtctttcgttttctcaactttatatatcttccggaaaggac

SEQ ID NO: 7281 - DNA, 224 bp, synthetic construct
  misc_feature 1..224: note = promoter
  source 1..224: mol_type = other DNA
gagggcctatttcccatggttccttcatatttgcatagaggatgcaagactgtcagagggacgattgcaattaacttggccataaacacaaacctattggcacaaactatgtgatatagaaagttatgattgtaagtttgtaatttaaaaaaaggaccactatgtacttaccgtaactgaaaagtctttcgttttctcaactttatatatcttccggaaaggac

SEQ ID NO: 7282 - DNA, 224 bp, synthetic construct
  misc_feature 1..224: note = promoter
  source 1..224: mol_type = other DNA
gagggcctatttcccatggttccttcatatttgcatagaggatgcaagactgtcagagggacgattgcaattaacttggccataaacacaaacctattggcacaaactatgtgatatagaaagttatgattgttagtttgtaatttaaaaaaaggaccactatgtacttaccgtaactgaaaagtctttcgttttctcaactttatatatcttccggaaaggac

SEQ ID NO: 7283 - DNA, 224 bp, synthetic construct
  misc_feature 1..224: note = promoter
  source 1..224: mol_type = other DNA
gagggcctatttcccatggttccttcatatttgcatagaggatgcaagactgtcagagggacgattgcaattaacttggccataaacacaaacctattggcacaaactatgtgatatagaaagttatgattgttcgtttgtaatttaaaaaaaggaccactatgtacttaccgtaactgaaaagtctttcgttttctcaactttatatatcttccggaaaggac

SEQ ID NO: 7284 - DNA, 224 bp, synthetic construct
  misc_feature 1..224: note = promoter
  source 1..224: mol_type = other DNA
gagggcctatttcccatggttccttcatatttgcatagaggatgcaagactgtcagagggacgattgcaattaacttggccataaacacaaacctattggcacaaactatgtgatatagaaagttatgattgttcatttgtaatttaaaaaaaggaccactatgtacttaccgtaactgaaaagtctttcgttttctcaactttatatatcttccggaaaggac

SEQ ID NO: 7285 - DNA, 224 bp, synthetic construct
  misc_feature 1..224: note = promoter
  source 1..224: mol_type = other DNA
gagggcctatttcccatggttccttcatatttgcatagaggatgcaagactgtcagagggacgattgcaattaacttggccataaacacaaacctattggcacaaactatgtgatatagaaagttatgattgttcaattgtaatttaaaaaaaggaccactatgtacttaccgtaactgaaaagtctttcgttttctcaactttatatatcttccggaaaggac

SEQ ID NO: 7286 - DNA, 224 bp, synthetic construct
  misc_feature 1..224: note = promoter
  source 1..224: mol_type = other DNA
gagggcctatttcccatggttccttcatatttgcatagaggatgcaagactgtcagagggacgattgcaattaacttggccataaacacaaacctattggcacaaactatgtgatatagaaagttatgattgttcaagtgtaatttaaaaaaaggaccactatgtacttaccgtaactgaaaagtctttcgttttctcaactttatatatcttccggaaaggac

SEQ ID NO: 7287 - DNA, 224 bp, synthetic construct
  misc_feature 1..224: note = promoter
  source 1..224: mol_type = other DNA
gagggcctatttcccatggttccttcatatttgcatagaggatgcaagactgtcagagggacgattgcaattaacttggccataaacacaaacctattggcacaaactatgtgatatagaaagttatgattgttcaagagtaatttaaaaaaaggaccactatgtacttaccgtaactgaaaagtctttcgttttctcaactttatatatcttccggaaaggac

SEQ ID NO: 7288 - DNA, 224 bp, synthetic construct
  misc_feature 1..224: note = promoter
  source 1..224: mol_type = other DNA
gagggcctatttcccatggttccttcatatttgcatagaggatgcaagactgtcagagggacgattgcaattaacttggccataaacacaaacctattggcacaaactatgtgatatagaaagttatgattgttcaagaataatttaaaaaaaggaccactatgtacttaccgtaactgaaaagtctttcgttttctcaactttatatatcttccggaaaggac

SEQ ID NO: 7289 - DNA, 224 bp, synthetic construct
  misc_feature 1..224: note = promoter
  source 1..224: mol_type = other DNA
gagggcctatttcccatggttccttcatatttgcatagaggatgcaagactgtcagagggacgattgcaattaacttggccataaacacaaacctattggcacaaactatgtgatatagaaagttatgattgttcaagaagaatttaaaaaaaggaccactatgtacttaccgtaactgaaaagtctttcgttttctcaactttatatatcttccggaaaggac

SEQ ID NO: 7290 - DNA, 224 bp, synthetic construct
  misc_feature 1..224: note = promoter
  source 1..224: mol_type = other DNA
gagggcctatttcccatggttccttcatatttgcatagaggatgcaagactgtcagagggacgattgcaattaacttggccataaacacaaacctattggcacaaactatgtgatatagaaagttatgattgttcaagaagtatttaaaaaaaggaccactatgtacttaccgtaactgaaaagtctttcgttttctcaactttatatatcttccggaaaggac

SEQ ID NO: 7291 - DNA, 224 bp, synthetic construct
  misc_feature 1..224: note = promoter
  source 1..224: mol_type = other DNA
gagggcctatttcccatggttccttcatatttgcatagaggatgcaagactgtcagagggacgattgcaattaacttggccataaacacaaacctattggcacaaactatgtgatatagaaagttatgattgttcaagaagtttttaaaaaaaggaccactatgtacttaccgtaactgaaaagtctttcgttttctcaactttatatatcttccggaaaggac

SEQ ID NO: 7292 - DNA, 224 bp, synthetic construct; identical to SEQ ID NO: 7291
  misc_feature 1..224: note = promoter
  source 1..224: mol_type = other DNA

SEQ ID NO: 7293 - DNA, 224 bp, synthetic construct
  misc_feature 1..224: note = promoter
  source 1..224: mol_type = other DNA
gagggcctatttcccatggttccttcatatttgcatagaggatgcaagactgtcagagggacgattgcaattaacttggccataaacacaaacctattggcacaaactatgtgatatagaaagttatgattgttcaagaagtttgtaaaaaaaggaccactatgtacttaccgtaactgaaaagtctttcgttttctcaactttatatatcttccggaaaggac

SEQ ID NO: 7294 - DNA, 224 bp, synthetic construct; identical to SEQ ID NO: 7293
  misc_feature 1..224: note = promoter
  source 1..224: mol_type = other DNA

SEQ ID NO: 7295 - DNA, 224 bp, synthetic construct; identical to SEQ ID NO: 7293
  misc_feature 1..224: note = promoter
  source 1..224: mol_type = other DNA

SEQ ID NO: 7296 - DNA, 224 bp, synthetic construct; identical to SEQ ID NO: 7293
  misc_feature 1..224: note = promoter
  source 1..224: mol_type = other DNA

SEQ ID NO: 7297 - DNA, 224 bp, synthetic construct
  misc_feature 1..224: note = promoter
  source 1..224: mol_type = other DNA
gagggcctatttcccatggttccttcatatttgcatagaggatgcaagactgtcagagggacgattgcaattaacttggccataaacacaaacctattggcacaaactatgtgatatagaaagttatgattgttcaagaagtttgtaataaaaggaccactatgtacttaccgtaactgaaaagtctttcgttttctcaactttatatatcttccggaaaggac

SEQ ID NO: 7298 - DNA, 224 bp, synthetic construct
  misc_feature 1..224: note = promoter
  source 1..224: mol_type = other DNA
gagggcctatttcccatggttccttcatatttgcatagaggatgcaagactgtcagagggacgattgcaattaacttggccataaacacaaacctattggcacaaactatgtgatatagaaagttatgattgttcaagaagtttgtaattaaaggaccactatgtacttaccgtaactgaaaagtctttcgttttctcaactttatatatcttccggaaaggac

SEQ ID NO: 7299 - DNA, 224 bp, synthetic construct
  misc_feature 1..224: note = promoter
  source 1..224: mol_type = other DNA
gagggcctatttcccatggttccttcatatttgcatagaggatgcaagactgtcagagggacgattgcaattaacttggccataaacacaaacctattggcacaaactatgtgatatagaaagttatgattgttcaagaagtttgtaatttaaggaccactatgtacttaccgtaactgaaaagtctttcgttttctcaactttatatatcttccggaaaggac

SEQ ID NO: 7300 - DNA, 224 bp, synthetic construct; identical to SEQ ID NO: 7299
  misc_feature 1..224: note = promoter
  source 1..224: mol_type = other DNA

SEQ ID NO: 7301 - DNA, 224 bp, synthetic construct; identical to SEQ ID NO: 7299
  misc_feature 1..224: note = promoter
  source 1..224: mol_type = other DNA

SEQ ID NO: 7302 - DNA, 224 bp, synthetic construct
  misc_feature 1..224: note = promoter
  source 1..224: mol_type = other DNA
gagggcctatttcccatggttccttcatatttgcatagaggatgcaagactgtcagagggacgattgcaattaacttggccataaacacaaacctattggcacaaactatgtgatatagaaagttatgattgttcaagaagtttgtaatttaaagaccactatgtacttaccgtaactgaaaagtctttcgttttctcaactttatatatcttccggaaaggac

SEQ ID NO: 7303 - DNA, 224 bp, synthetic construct
  misc_feature 1..224: note = promoter
  source 1..224: mol_type = other DNA
gagggcctatttcccatggttccttcatatttgcatagaggatgcaagactgtcagagggacgattgcaattaacttggccataaacacaaacctattggcacaaactatgtgatatagaaagttatgattgttcaagaagtttgtaatttaaaaaccactatgtacttaccgtaactgaaaagtctttcgttttctcaactttatatatcttccggaaaggac

SEQ ID NO: 7304 - DNA, 224 bp, synthetic construct; identical to SEQ ID NO: 7303
  misc_feature 1..224: note = promoter
  source 1..224: mol_type = other DNA

SEQ ID NO: 7305 - DNA, 224 bp, synthetic construct
  misc_feature 1..224: note = promoter
  source 1..224: mol_type = other DNA
gagggcctatttcccatggttccttcatatttgcatagaggatgcaagactgtcagagggacgattgcaattaacttggccataaacacaaacctattggcacaaactatgtgatatagaaagttatgattgttcaagaagtttgtaatttaaaaaacactatgtacttaccgtaactgaaaagtctttcgttttctcaactttatatatcttccggaaaggac

SEQ ID NO: 7306 - DNA, 224 bp, synthetic construct
  misc_feature 1..224: note = promoter
  source 1..224: mol_type = other DNA
gagggcctatttcccatggttccttcatatttgcatagaggatgcaagactgtcagagggacgattgcaattaacttggccataaacacaaacctattggcacaaactatgtgatatagaaagttatgattgttcaagaagtttgtaatttaaaaaaaactatgtacttaccgtaactgaaaagtctttcgttttctcaactttatatatcttccggaaaggac

SEQ ID NO: 7307 - DNA, 224 bp, synthetic construct
  misc_feature 1..224: note = promoter
  source 1..224: mol_type = other DNA
gagggcctatttcccatggttccttcatatttgcatagaggatgcaagactgtcagagggacgattgcaattaacttggccataaacacaaacctattggcacaaactatgtgatatagaaagttatgattgttcaagaagtttgtaatttaaaaaaagctatgtacttaccgtaactgaaaagtctttcgttttctcaactttatatatcttccggaaaggac

SEQ ID NO: 7308 - DNA, 224 bp, synthetic construct
  misc_feature 1..224: note = promoter
  source 1..224: mol_type = other DNA
gagggcctatttcccatggttccttcatatttgcatagaggatgcaagactgtcagagggacgattgcaattaacttggccataaacacaaacctattggcacaaactatgtgatatagaaagttatgattgttcaagaagtttgtaatttaaaaaaaggtatgtacttaccgtaactgaaaagtctttcgttttctcaactttatatatcttccggaaaggac

SEQ ID NO: 7309 - DNA, 224 bp, synthetic construct
  misc_feature 1..224: note = promoter
  source 1..224: mol_type = other DNA
gagggcctatttcccatggttccttcatatttgcatagaggatgcaagactgtcagagggacgattgcaattaacttggccataaacacaaacctattggcacaaactatgtgatatagaaagttatgattgttcaagaagtttgtaatttaaaaaaaggaatgtacttaccgtaactgaaaagtctttcgttttctcaactttatatatcttccggaaaggac

SEQ ID NO: 7310 - DNA, 224 bp, synthetic construct
  misc_feature 1..224: note = promoter
  source 1..224: mol_type = other DNA
gagggcctatttcccatggttccttcatatttgcatagaggatgcaagactgtcagagggacgattgcaattaacttggccataaacacaaacctattggcacaaactatgtgatatagaaagttatgattgttcaagaagtttgtaatttaaaaaaaggactgtacttaccgtaactgaaaagtctttcgttttctcaactttatatatcttccggaaaggac

SEQ ID NO: 7311 - DNA, 224 bp, synthetic construct
  misc_feature 1..224: note = promoter
  source 1..224: mol_type = other DNA
gagggcctatttcccatggttccttcatatttgcatagaggatgcaagactgtcagagggacgattgcaattaacttggccataaacacaaacctattggcacaaactatgtgatatagaaagttatgattgttcaagaagtttgtaatttaaaaaaaggaccgtacttaccgtaactgaaaagtctttcgttttctcaactttatatatcttccggaaaggac

SEQ ID NO: 7312 - DNA, 224 bp, synthetic construct
  misc_feature 1..224: note = promoter
  source 1..224: mol_type = other DNA
gagggcctatttcccatggttccttcatatttgcatagaggatgcaagactgtcagagggacgattgcaattaacttggccataaacacaaacctattggcacaaactatgtgatatagaaagttatgattgttcaagaagtttgtaatttaaaaaaaggaccatacttaccgtaactgaaaagtctttcgttttctcaactttatatatcttccggaaaggac

SEQ ID NO: 7313 - DNA, 224 bp, synthetic construct
  misc_feature 1..224: note = promoter
  source 1..224: mol_type = other DNA
gagggcctatttcccatggttccttcatatttgcatagaggatgcaagactgtcagagggacgattgcaattaacttggccataaacacaaacctattggcacaaactatgtgatatagaaagttatgattgttcaagaagtttgtaatttaaaaaaaggaccacacttaccgtaactgaaaagtctttcgttttctcaactttatatatcttccggaaaggac

SEQ ID NO: 7314 - DNA, 224 bp, synthetic construct
  misc_feature 1..224: note = promoter
  source 1..224: mol_type = other DNA
gagggcctatttcccatggttccttcatatttgcatagaggatgcaagactgtcagagggacgattgcaattaacttggccataaacacaaacctattggcacaaactatgtgatatagaaagttatgattgttcaagaagtttgtaatttaaaaaaaggaccactcttaccgtaactgaaaagtctttcgttttctcaactttatatatcttccggaaaggac

SEQ ID NO: 7315 - DNA, 224 bp, synthetic construct
  misc_feature 1..224: note = promoter
  source 1..224: mol_type = other DNA
gagggcctatttcccatggttccttcatatttgcatagaggatgcaagactgtcagagggacgattgcaattaacttggccataaacacaaacctattggcacaaactatgtgatatagaaagttatgattgttcaagaagtttgtaatttaaaaaaaggaccactattaccgtaactgaaaagtctttcgttttctcaactttatatatcttccggaaaggac

SEQ ID NO: 7316 - DNA, 224 bp, synthetic construct; identical to SEQ ID NO: 7315
  misc_feature 1..224: note = promoter
  source 1..224: mol_type = other DNA

SEQ ID NO: 7317 - DNA, 224 bp, synthetic construct
  misc_feature 1..224: note = promoter
  source 1..224: mol_type = other DNA
gagggcctatttcccatggttccttcatatttgcatagaggatgcaagactgtcagagggacgattgcaattaacttggccataaacacaaacctattggcacaaactatgtgatatagaaagttatgattgttcaagaagtttgtaatttaaaaaaaggaccactatgaccgtaactgaaaagtctttcgttttctcaactttatatatcttccggaaaggac

SEQ ID NO: 7318 - DNA, 224 bp, synthetic construct
  misc_feature 1..224: note = promoter
  source 1..224: mol_type = other DNA
gagggcctatttcccatggttccttcatatttgcatagaggatgcaagactgtcagagggacgattgcaattaacttggccataaacacaaacctattggcacaaactatgtgatatagaaagttatgattgttcaagaagtttgtaatttaaaaaaaggaccactatgtccgtaactgaaaagtctttcgttttctcaactttatatatcttccggaaaggac

SEQ ID NO: 7319 - DNA, 224 bp, synthetic construct
  misc_feature 1..224: note = promoter
  source 1..224: mol_type = other DNA
gagggcctatttcccatggttccttcatatttgcatagaggatgcaagactgtcagagggacgattgcaattaacttggccataaacacaaacctattggcacaaactatgtgatatagaaagttatgattgttcaagaagtttgtaatttaaaaaaaggaccactatgtacgtaactgaaaagtctttcgttttctcaactttatatatcttccggaaaggac

SEQ ID NO: 7320 - DNA, 224 bp, synthetic construct; identical to SEQ ID NO: 7319
  misc_feature 1..224: note = promoter
  source 1..224: mol_type = other DNA

SEQ ID NO: 7321 - DNA, 224 bp, synthetic construct
  misc_feature 1..224: note = promoter
  source 1..224: mol_type = other DNA
gagggcctatttcccatggttccttcatatttgcatagaggatgcaagactgtcagagggacgattgcaattaacttggccataaacacaaacctattggcacaaactatgtgatatagaaagttatgattgttcaagaagtttgtaatttaaaaaaaggaccactatgtacttaactgaaaagtctttcgttttctcaactttatatatcttccggaaaggac

SEQ ID NO: 7322 - DNA, 224 bp, synthetic construct; identical to SEQ ID NO: 7321
  misc_feature 1..224: note = promoter
  source 1..224: mol_type = other DNA

SEQ ID NO: 7323 - DNA, 224 bp, synthetic construct; identical to SEQ ID NO: 7321
  misc_feature 1..224: note = promoter
  source 1..224: mol_type = other DNA

SEQ ID NO: 7324 - DNA, 224 bp, synthetic construct
  misc_feature 1..224: note = promoter
  source 1..224: mol_type = other DNA
gagggcctatttcccatggttccttcatatttgcatagaggatgcaagactgtcagagggacgattgcaattaacttggccataaacacaaacctattggcacaaactatgtgatatagaaagttatgattgttcaagaagtttgtaatttaaaaaaaggaccactatgtacttacctgaaaagtctttcgttttctcaactttatatatcttccggaaaggac

SEQ ID NO: 7325 - DNA, 224 bp, synthetic construct; identical to SEQ ID NO: 7324
  misc_feature 1..224: note = promoter
  source 1..224: mol_type = other DNA

SEQ ID NO: 7326 - DNA, 224 bp, synthetic construct
  misc_feature 1..224: note = promoter
  source 1..224: mol_type = other DNA
gagggcctatttcccatggttccttcatatttgcatagaggatgcaagactgtcagagggacgattgcaattaacttggccataaacacaaacctattggcacaaactatgtgatatagaaagttatgattgttcaagaagtttgtaatttaaaaaaaggaccactatgtacttaccggaaaagtctttcgttttctcaactttatatatcttccggaaaggac

SEQ ID NO: 7327 - DNA, 224 bp, synthetic construct
  misc_feature 1..224: note = promoter
  source 1..224: mol_type = other DNA
gagggcctatttcccatggttccttcatatttgcatagaggatgcaagactgtcagagggacgattgcaattaacttggccataaacacaaacctattggcacaaactatgtgatatagaaagttatgattgttcaagaagtttgtaatttaaaaaaaggaccactatgtacttaccgtaaaagtctttcgttttctcaactttatatatcttccggaaaggac

SEQ ID NO: 7328 - DNA, 224 bp, synthetic construct; identical to SEQ ID NO: 7327
  misc_feature 1..224: note = promoter
  source 1..224: mol_type = other DNA

SEQ ID NO: 7329 - DNA, 224 bp, synthetic construct; identical to SEQ ID NO: 7327
  misc_feature 1..224: note = promoter
  source 1..224: mol_type = other DNA

SEQ ID NO: 7330 - DNA, 224 bp, synthetic construct
  misc_feature 1..224: note = promoter
  source 1..224: mol_type = other DNA
gagggcctatttcccatggttccttcatatttgcatagaggatgcaagactgtcagagggacgattgcaattaacttggccataaacacaaacctattggcacaaactatgtgatatagaaagttatgattgttcaagaagtttgtaatttaaaaaaaggaccactatgtacttaccgtaacagtctttcgttttctcaactttatatatcttccggaaaggac

SEQ ID NO: 7331 - DNA, 224 bp, synthetic construct
  misc_feature 1..224: note = promoter
  source 1..224: mol_type = other DNA
gagggcctatttcccatggttccttcatatttgcatagaggatgcaagactgtcagagggacgattgcaattaacttggccataaacacaaacctattggcacaaactatgtgatatagaaagttatgattgttcaagaagtttgtaatttaaaaaaaggaccactatgtacttaccgtaactgtctttcgttttctcaactttatatatcttccggaaaggac

SEQ ID NO: 7332 - DNA, 224 bp, synthetic construct; identical to SEQ ID NO: 7331
  misc_feature 1..224: note = promoter
  source 1..224: mol_type = other DNA

SEQ ID NO: 7333 - DNA, 224 bp, synthetic construct
  misc_feature 1..224: note = promoter
  source 1..224: mol_type = other DNA
gagggcctatttcccatggttccttcatatttgcatagaggatgcaagactgtcagagggacgattgcaattaacttggccataaacacaaacctattggcacaaactatgtgatatagaaagttatgattgttcaagaagtttgtaatttaaaaaaaggaccactatgtacttaccgtaactgactttcgttttctcaactttatatatcttccggaaaggac

SEQ ID NO: 7334 - DNA, 224 bp, synthetic construct
  misc_feature 1..224: note = promoter
  source 1..224: mol_type = other DNA
gagggcctatttcccatggttccttcatatttgcatagaggatgcaagactgtcagagggacgattgcaattaacttggccataaacacaaacctattggcacaaactatgtgatatagaaagttatgattgttcaagaagtttgtaatttaaaaaaaggaccactatgtacttaccgtaactgaatttcgttttctcaactttatatatcttccggaaaggac

SEQ ID NO: 7335 - DNA, 224 bp, synthetic construct
  misc_feature 1..224: note = promoter
  source 1..224: mol_type = other DNA
gagggcctatttcccatggttccttcatatttgcatagaggatgcaagactgtcagagggacgattgcaattaacttggccataaacacaaacctattggcacaaactatgtgatatagaaagttatgattgttcaagaagtttgtaatttaaaaaaaggaccactatgtacttaccgtaactgaaattcgttttctcaactttatatatcttccggaaaggac

SEQ ID NO: 7336 - DNA, 224 bp, synthetic construct
  misc_feature 1..224: note = promoter
  source 1..224: mol_type = other DNA
gagggcctatttcccatggttccttcatatttgcatagaggatgcaagactgtcagagggacgattgcaattaacttggccataaacacaaacctattggcacaaactatgtgatatagaaagttatgattgttcaagaagtttgtaatttaaaaaaaggaccactatgtacttaccgtaactgaaaatcgttttctcaactttatatatcttccggaaaggac

SEQ ID NO: 7337 - DNA, 224 bp, synthetic construct
  misc_feature 1..224: note = promoter
  source 1..224: mol_type = other DNA
gagggcctatttcccatggttccttcatatttgcatagaggatgcaagactgtcagagggacgattgcaattaacttggccataaacacaaacctattggcacaaactatgtgatatagaaagttatgattgttcaagaagtttgtaatttaaaaaaaggaccactatgtacttaccgtaactgaaaagcgttttctcaactttatatatcttccggaaaggac

SEQ ID NO: 7338 - DNA, 224 bp, synthetic construct
  misc_feature 1..224: note = promoter
  source 1..224: mol_type = other DNA
gagggcctatttcccatggttccttcatatttgcatagaggatgcaagactgtcagagggacgattgcaattaacttggccataaacacaaacctattggcacaaactatgtgatatagaaagttatgattgttcaagaagtttgtaatttaaaaaaaggaccactatgtacttaccgtaactgaaaagtgttttctcaactttatatatcttccggaaaggac

SEQ ID NO: 7339 - DNA, 224 bp, synthetic construct
  misc_feature 1..224: note = promoter
  source 1..224: mol_type = other DNA
gagggcctatttcccatggttccttcatatttgcatagaggatgcaagactgtcagagggacgattgcaattaacttggccataaacacaaacctattggcacaaactatgtgatatagaaagttatgattgttcaagaagtttgtaatttaaaaaaaggaccactatgtacttaccgtaactgaaaagtcttttctcaactttatatatcttccggaaaggac

SEQ ID NO: 7340 - DNA, 224 bp, synthetic construct; identical to SEQ ID NO: 7339
  misc_feature 1..224: note = promoter
  source 1..224: mol_type = other DNA

SEQ ID NO: 7341 - DNA, 224 bp, synthetic construct; identical to SEQ ID NO: 7339
  misc_feature 1..224: note = promoter
  source 1..224: mol_type = other DNA

SEQ ID NO: 7342 - DNA, 224 bp, synthetic construct; identical to SEQ ID NO: 7339
  misc_feature 1..224: note = promoter
  source 1..224: mol_type = other DNA

SEQ ID NO: 7343 - DNA, 224 bp, synthetic construct
  misc_feature 1..224: note = promoter
  source 1..224: mol_type = other DNA
gagggcctatttcccatggttccttcatatttgcatagaggatgcaagactgtcagagggacgattgcaattaacttggccataaacacaaacctattggcacaaactatgtgatatagaaagttatgattgttcaagaagtttgtaatttaaaaaaaggaccactatgtacttaccgtaactgaaaagtctttcctcaactttatatatcttccggaaaggac

SEQ ID NO: 7344 - DNA, 224 bp, synthetic construct
  misc_feature 1..224: note = promoter
  source 1..224: mol_type = other DNA
gagggcctatttcccatggttccttcatatttgcatagaggatgcaagactgtcagagggacgattgcaattaacttggccataaacacaaacctattggcacaaactatgtgatatagaaagttatgattgttcaagaagtttgtaatttaaaaaaaggaccactatgtacttaccgtaactgaaaagtctttcgtcaactttatatatcttccggaaaggac

SEQ ID NO: 7345 - DNA, 224 bp, synthetic construct; identical to SEQ ID NO: 7344
  misc_feature 1..224: note = promoter
  source 1..224: mol_type = other DNA

SEQ ID NO: 7346 - DNA, 224 bp, synthetic construct
  misc_feature 1..224: note = promoter
  source 1..224: mol_type = other DNA
gagggcctatttcccatggttccttcatatttgcatagaggatgcaagactgtcagagggacgattgcaattaacttggccataaacacaaacctattggcacaaactatgtgatatagaaagttatgattgttcaagaagtttgtaatttaaaaaaaggaccactatgtacttaccgtaactgaaaagtctttcgttaactttatatatcttccggaaaggac

SEQ ID NO: 7347 - DNA, 224 bp, synthetic construct
  misc_feature 1..224: note = promoter
  source 1..224: mol_type = other DNA
gagggcctatttcccatggttccttcatatttgcatagaggatgcaagactgtcagagggacgattgcaattaacttggccataaacacaaacctattggcacaaactatgtgatatagaaagttatgattgttcaagaagtttgtaatttaaaaaaaggaccactatgtacttaccgtaactgaaaagtctttcgtttactttatatatcttccggaaaggac

SEQ ID NO: 7348 - DNA, 224 bp, synthetic construct
  misc_feature 1..224: note = promoter
  source 1..224: mol_type = other DNA
gagggcctatttcccatggttccttcatatttgcatagaggatgcaagactgtcagagggacgattgcaattaacttggccataaacacaaacctattggcacaaactatgtgatatagaaagttatgattgttcaagaagtttgtaatttaaaaaaaggaccactatgtacttaccgtaactgaaaagtctttcgttttctttatatatcttccggaaaggac

SEQ ID NO: 7349 - DNA, 224 bp, synthetic construct; identical to SEQ ID NO: 7348
  misc_feature 1..224: note = promoter
  source 1..224: mol_type = other DNA

SEQ ID NO: 7350 - DNA, 224 bp, synthetic construct; identical to SEQ ID NO: 7348
  misc_feature 1..224: note = promoter
  source 1..224: mol_type = other DNA

SEQ ID NO: 7351 - DNA, 224 bp, synthetic construct
  misc_feature 1..224: note = promoter
  source 1..224: mol_type = other DNA
gagggcctatttcccatggttccttcatatttgcatagaggatgcaagactgtcagagggacgattgcaattaacttggccataaacacaaacctattggcacaaactatgtgatatagaaagttatgattgttcaagaagtttgtaatttaaaaaaaggaccactatgtacttaccgtaactgaaaagtctttcgttttctctatatatcttccggaaaggac

SEQ ID NO: 7352 - DNA, 224 bp, synthetic construct
  misc_feature 1..224: note = promoter
  source 1..224: mol_type = other DNA
gagggcctatttcccatggttccttcatatttgcatagaggatgcaagactgtcagagggacgattgcaattaacttggccataaacacaaacctattggcacaaactatgtgatatagaaagttatgattgttcaagaagtttgtaatttaaaaaaaggaccactatgtacttaccgtaactgaaaagtctttcgttttctcaatatatcttccggaaaggac

SEQ ID NO: 7353 - DNA, 224 bp, synthetic construct; identical to SEQ ID NO: 7352
  misc_feature 1..224: note = promoter
  source 1..224: mol_type = other DNA

SEQ ID NO: 7354 - DNA, 224 bp, synthetic construct
  misc_feature 1..224: note = promoter
  source 1..224: mol_type = other DNA
gagggcctatttcccatggttccttcatatttgcatagaggatgcaagactgtcagagggacgattgcaattaacttggccataaacacaaacctattggcacaaactatgtgatatagaaagttatgattgttcaagaagtttgtaatttaaaaaaaggaccactatgtacttaccgtaactgaaaagtctttcgttttctcaacatatcttccggaaaggac

SEQ ID NO: 7355 - DNA, 224 bp, synthetic construct
  misc_feature 1..224: note = promoter
  source 1..224: mol_type = other DNA
gagggcctatttcccatggttccttcatatttgcatagaggatgcaagactgtcagagggacgattgcaattaacttggccataaacacaaacctattggcacaaactatgtgatatagaaagttatgattgttcaagaagtttgtaatttaaaaaaaggaccactatgtacttaccgtaactgaaaagtctttcgttttctcaacttatcttccggaaaggac

SEQ ID NO: 7356 - DNA, 224 bp, synthetic construct; identical to SEQ ID NO: 7355
  misc_feature 1..224: note = promoter
  source 1..224: mol_type = other DNA

SEQ ID NO: 7357 - DNA, 224 bp, synthetic construct
  misc_feature 1..224: note = promoter
  source 1..224: mol_type = other DNA
gagggcctatttcccatggttccttcatatttgcatagaggatgcaagactgtcagagggacgattgcaattaacttggccataaacacaaacctattggcacaaactatgtgatatagaaagttatgattgttcaagaagtttgtaatttaaaaaaaggaccactatgtacttaccgtaactgaaaagtctttcgttttctcaacttttcttccggaaaggac

SEQ ID NO: 7358 - DNA, 224 bp, synthetic construct
  misc_feature 1..224: note = promoter
  source 1..224: mol_type = other DNA
gagggcctatttcccatggttccttcatatttgcatagaggatgcaagactgtcagagggacgattgcaattaacttggccataaacacaaacctattggcacaaactatgtgatatagaaagttatgattgttcaagaagtttgtaatttaaaaaaaggaccactatgtacttaccgtaactgaaaagtctttcgttttctcaactttacttccggaaaggac

SEQ ID NO: 7359 - DNA, 224 bp, synthetic construct
  misc_feature 1..224: note = promoter
  source 1..224: mol_type = other DNA
gagggcctatttcccatggttccttcatatttgcatagaggatgcaagactgtcagagggacgattgcaattaacttggccataaacacaaacctattggcacaaactatgtgatatagaaagttatgattgttcaagaagtttgtaatttaaaaaaaggaccactatgtacttaccgtaactgaaaagtctttcgttttctcaactttatttccggaaaggac

SEQ ID NO: 7360 - DNA, 224 bp, synthetic construct
  misc_feature 1..224: note = promoter
  source 1..224: mol_type = other DNA
gagggcctatttcccatggttccttcatatttgcatagaggatgcaagactgtcagagggacgattgcaattaacttggccataaacacaaacctattggcacaaactatgtgatatagaaagttatgattgttcaagaagtttgtaatttaaaaaaaggaccactatgtacttaccgtaactgaaaagtctttcgttttctcaactttatatccggaaaggac

SEQ ID NO: 7361 - DNA, 224 bp, synthetic construct; identical to SEQ ID NO: 7360
  misc_feature 1..224: note = promoter
  source 1..224: mol_type = other DNA

SEQ ID NO: 7362 - DNA, 224 bp, synthetic construct
  misc_feature 1..224: note = promoter
  source 1..224: mol_type = other DNA
gagggcctatttcccatggttccttcatatttgcatagaggatgcaagactgtcagagggacgattgcaattaacttggccataaacacaaacctattggcacaaactatgtgatatagaaagttatgattgttcaagaagtttgtaatttaaaaaaaggaccactatgtacttaccgtaactgaaaagtctttcgttttctcaactttatatacggaaaggac

SEQ ID NO: 7363 - DNA, 224 bp, synthetic construct
  misc_feature 1..224: note = promoter
  source 1..224: mol_type = other DNA
gagggcctatttcccatggttccttcatatttgcatagaggatgcaagactgtcagagggacgattgcaattaacttggccataaacacaaacctattggcacaaactatgtgatatagaaagttatgattgttcaagaagtttgtaatttaaaaaaaggaccactatgtacttaccgtaactgaaaagtctttcgttttctcaactttatatatggaaaggac

SEQ ID NO: 7364 - DNA, 224 bp, synthetic construct
  misc_feature 1..224: note = promoter
  source 1..224: mol_type = other DNA
gagggcctatttcccatggttccttcatatttgcatagaggatgcaagactgtcagagggacgattgcaattaacttggccataaacacaaacctattggcacaaactatgtgatatagaaagttatgattgttcaagaagtttgtaatttaaaaaaaggaccactatgtacttaccgtaactgaaaagtctttcgttttctcaactttatatatcgaaaggac

SEQ ID NO: 7365 - DNA, 224 bp, synthetic construct
  misc_feature 1..224: note = promoter
  source 1..224: mol_type = other DNA
gagggcctatttcccatggttccttcatatttgcatagaggatgcaagactgtcagagggacgattgcaattaacttggccataaacacaaacctattggcacaaactatgtgatatagaaagttatgattgttcaagaagtttgtaatttaaaaaaaggaccactatgtacttaccgtaactgaaaagtctttcgttttctcaactttatatatctaaaggac

SEQ ID NO: 7366 - DNA, 224 bp, synthetic construct
  misc_feature 1..224: note = promoter
  source 1..224: mol_type = other DNA
gagggcctatttcccatggttccttcatatttgcatagaggatgcaagactgtcagagggacgattgcaattaacttggccataaacacaaacctattggcacaaactatgtgatatagaaagttatgattgttcaagaagtttgtaatttaaaaaaaggaccactatgtacttaccgtaactgaaaagtctttcgttttctcaactttatatatcttaaggac

SEQ ID NO: 7367 - DNA, 224 bp, synthetic construct
  misc_feature 1..224: note = promoter
  source 1..224: mol_type = other DNA
gagggcctatttcccatggttccttcatatttgcatagaggatgcaagactgtcagagggacgattgcaattaacttggccataaacacaaacctattggcacaaactatgtgatatagaaagttatgattgttcaagaagtttgtaatttaaaaaaaggaccactatgtacttaccgtaactgaaaagtctttcgttttctcaactttatatatcttcaggac

SEQ ID NO: 7368 - DNA, 224 bp, synthetic construct
  misc_feature 1..224: note = promoter
  source 1..224: mol_type = other DNA
gagggcctatttcccatggttccttcatatttgcatagaggatgcaagactgtcagagggacgattgcaattaacttggccataaacacaaacctattggcacaaactatgtgatatagaaagttatgattgttcaagaagtttgtaatttaaaaaaaggaccactatgtacttaccgtaactgaaaagtctttcgttttctcaactttatatatcttccggac

SEQ ID NO: 7369 - DNA, 224 bp, synthetic construct; identical to SEQ ID NO: 7368
  misc_feature 1..224: note = promoter
  source 1..224: mol_type = other DNA

SEQ ID NO: 7370 - DNA, 224 bp, synthetic construct; identical to SEQ ID NO: 7368
  misc_feature 1..224: note = promoter
  source 1..224: mol_type = other DNA

SEQ ID NO: 7371 - DNA, 224 bp, synthetic construct; identical to SEQ ID NO: 7368
  misc_feature 1..224: note = promoter
  source 1..224: mol_type = other DNA

SEQ ID NO: 7372 - DNA, 224 bp, synthetic construct
  misc_feature 1..224: note = promoter
  source 1..224: mol_type = other DNA
gagggcctatttcccatggttccttcatatttgcatagaggatgcaagactgtcagagggacgattgcaattaacttggccataaacacaaacctattggcacaaactatgtgatatagaaagttatgattgttcaagaagtttgtaatttaaaaaaaggaccactatgtacttaccgtaactgaaaagtctttcgttttctcaactttatatatcttccggaa

SEQ ID NO: 7373 - DNA, 225 bp, synthetic construct
  misc_feature 1..225: note = promoter
  source 1..225: mol_type = other DNA
gagggcctatttcccatggttccttcatatttgcatagaggatgcaagactgtcagagggacgattgcaattaacttggccataaacacaaacctattggcacaaactatgtgatatagaaagttatgattgttcaagaagtttgtaatttaaaaaaaggaccactatgtacttaccgtaactgaaaagtctttcgttttctcaactttatatatcttccggaaa

SEQ ID NO: 7374 - DNA, 226 bp, synthetic construct
  misc_feature 1..226: note = promoter
  source 1..226: mol_type = other DNA
gagggcctatttcccatggttccttcatatttgcatagaggatgcaagactgtcagagggacgattgcaattaacttggccataaacacaaacctattggcacaaactatgtgatatagaaagttatgattgttcaagaagtttgtaatttaaaaaaaggaccactatgtacttaccgtaactgaaaagtctttcgttttctcaactttatatatcttccggaaag

SEQ ID NO: 7375 - DNA, 227 bp, synthetic construct; identical to SEQ ID NO: 7146
  misc_feature 1..227: note = promoter
  source 1..227: mol_type = other DNA

SEQ ID NO: 7376 - DNA, 228 bp, synthetic construct; identical to SEQ ID NO: 6918
  misc_feature 1..228: note = promoter
  source 1..228: mol_type = other DNA

SEQ ID NO: 7377 - DNA, 219 bp, synthetic construct
  misc_feature 1..219: note = promoter
  source 1..219: mol_type = other DNA
ttcccatggttccttcatatttgcatagaggatgcaagactgtcagagggacgattgcaattaacttggccataaacacaaacctattggcacaaactatgtgatatagaaagttatgattgttcaagaagtttgtaatttaaaaaaaggaccactatgtacttaccgtaactgaaaagtctttcgttttctcaactttatatatcttccggaaaggac

SEQ ID NO: 7378 - DNA, 219 bp, synthetic construct
  misc_feature 1..219: note = promoter
  source 1..219: mol_type = other DNA
gtcccatggttccttcatatttgcatagaggatgcaagactgtcagagggacgattgcaattaacttggccataaacacaaacctattggcacaaactatgtgatatagaaagttatgattgttcaagaagtttgtaatttaaaaaaaggaccactatgtacttaccgtaactgaaaagtctttcgttttctcaactttatatatcttccggaaaggac

SEQ ID NO: 7379 - DNA, 219 bp, synthetic construct
  misc_feature 1..219: note = promoter
  source 1..219: mol_type = other DNA
gacccatggttccttcatatttgcatagaggatgcaagactgtcagagggacgattgcaattaacttggccataaacacaaacctattggcacaaactatgtgatatagaaagttatgattgttcaagaagtttgtaatttaaaaaaaggaccactatgtacttaccgtaactgaaaagtctttcgttttctcaactttatatatcttccggaaaggac

SEQ ID NO: 7380 - DNA, 219 bp, synthetic construct
  misc_feature 1..219: note = promoter
  source 1..219: mol_type = other DNA
gagccatggttccttcatatttgcatagaggatgcaagactgtcagagggacgattgcaattaacttggccataaacacaaacctattggcacaaactatgtgatatagaaagttatgattgttcaagaagtttgtaatttaaaaaaaggaccactatgtacttaccgtaactgaaaagtctttcgttttctcaactttatatatcttccggaaaggac

SEQ ID NO: 7381 - DNA, 219 bp, synthetic construct
  misc_feature 1..219: note = promoter
  source 1..219: mol_type = other DNA
gaggcatggttccttcatatttgcatagaggatgcaagactgtcagagggacgattgcaattaacttggccataaacacaaacctattggcacaaactatgtgatatagaaagttatgattgttcaagaagtttgtaatttaaaaaaaggaccactatgtacttaccgtaactgaaaagtctttcgttttctcaactttatatatcttccggaaaggac

SEQ ID NO: 7382 - DNA, 219 bp, synthetic construct
  misc_feature 1..219: note = promoter
  source 1..219: mol_type = other DNA
gagggatggttccttcatatttgcatagaggatgcaagactgtcagagggacgattgcaattaacttggccataaacacaaacctattggcacaaactatgtgatatagaaagttatgattgttcaagaagtttgtaatttaaaaaaaggaccactatgtacttaccgtaactgaaaagtctttcgttttctcaactttatatatcttccggaaaggac

SEQ ID NO: 7383 - DNA, 219 bp, synthetic construct
  misc_feature 1..219: note = promoter
  source 1..219: mol_type = other DNA
gagggctggttccttcatatttgcatagaggatgcaagactgtcagagggacgattgcaattaacttggccataaacacaaacctattggcacaaactatgtgatatagaaagttatgattgttcaagaagtttgtaatttaaaaaaaggaccactatgtacttaccgtaactgaaaagtctttcgttttctcaactttatatatcttccggaaaggac

SEQ ID NO: 7384 - DNA, 219 bp, synthetic construct
  misc_feature 1..219: note = promoter
  source 1..219: mol_type = other DNA
gagggccggttccttcatatttgcatagaggatgcaagactgtcagagggacgattgcaattaacttggccataaacacaaacctattggcacaaactatgtgatatagaaagttatgattgttcaagaagtttgtaatttaaaaaaaggaccactatgtacttaccgtaactgaaaagtctttcgttttctcaactttatatatcttccggaaaggac

SEQ ID NO: 7385 - DNA, 219 bp, synthetic construct
  misc_feature 1..219: note = promoter
  source 1..219: mol_type = other DNA
gagggcctgttccttcatatttgcatagaggatgcaagactgtcagagggacgattgcaattaacttggccataaacacaaacctattggcacaaactatgtgatatagaaagttatgattgttcaagaagtttgtaatttaaaaaaaggaccactatgtacttaccgtaactgaaaagtctttcgttttctcaactttatatatcttccggaaaggac

SEQ ID NO: 7386 - DNA, 219 bp, synthetic construct
  misc_feature 1..219: note = promoter
  source 1..219: mol_type = other DNA
gagggcctattccttcatatttgcatagaggatgcaagactgtcagagggacgattgcaattaacttggccataaacacaaacctattggcacaaactatgtgatatagaaagttatgattgttcaagaagtttgtaatttaaaaaaaggaccactatgtacttaccgtaactgaaaagtctttcgttttctcaactttatatatcttccggaaaggac

SEQ ID NO: 7387 - DNA, 219 bp, synthetic construct; identical to SEQ ID NO: 7386
  misc_feature 1..219: note = promoter
  source 1..219: mol_type = other DNA

SEQ ID NO: 7388 - DNA, 219 bp, synthetic construct; identical to SEQ ID NO: 7386
  misc_feature 1..219: note = promoter
  source 1..219: mol_type = other DNA

SEQ ID NO: 7389 - DNA, 219 bp, synthetic construct
  misc_feature 1..219: note = promoter
  source 1..219: mol_type = other DNA
gagggcctatttcttcatatttgcatagaggatgcaagactgtcagagggacgattgcaattaacttggccataaacacaaacctattggcacaaactatgtgatatagaaagttatgattgttcaagaagtttgtaatttaaaaaaaggaccactatgtacttaccgtaactgaaaagtctttcgttttctcaactttatatatcttccggaaaggac

SEQ ID NO: 7390 - DNA, 219 bp, synthetic construct; identical to SEQ ID NO: 7389
  misc_feature 1..219: note = promoter
  source 1..219: mol_type = other DNA

SEQ ID NO: 7391 - DNA, 219 bp, synthetic construct
  misc_feature 1..219: note = promoter
  source 1..219: mol_type = other DNA
gagggcctatttcctcatatttgcatagaggatgcaagactgtcagagggacgattgcaattaacttggccataaacacaaacctattggcacaaactatgtgatatagaaagttatgattgttcaagaagtttgtaatttaaaaaaaggaccactatgtacttaccgtaactgaaaagtctttcgttttctcaactttatatatcttccggaaaggac

SEQ ID NO: 7392 - DNA, 219 bp, synthetic construct
  misc_feature 1..219: note = promoter
  source 1..219: mol_type = other DNA
gagggcctatttccccatatttgcatagaggatgcaagactgtcagagggacgattgcaattaacttggccataaacacaaacctattggcacaaactatgtgatatagaaagttatgattgttcaagaagtttgtaatttaaaaaaaggaccactatgtacttaccgtaactgaaaagtctttcgttttctcaactttatatatcttccggaaaggac

SEQ ID NO: 7393 - DNA, 219 bp, synthetic construct
  misc_feature 1..219: note = promoter
  source 1..219: mol_type = other DNA
gagggcctatttcccaatatttgcatagaggatgcaagactgtcagagggacgattgcaattaacttggccataaacacaaacctattggcacaaactatgtgatatagaaagttatgattgttcaagaagtttgtaatttaaaaaaaggaccactatgtacttaccgtaactgaaaagtctttcgttttctcaactttatatatcttccggaaaggac

SEQ ID NO: 7394 - DNA, 219 bp, synthetic construct
  misc_feature 1..219: note = promoter
  source 1..219: mol_type = other DNA
gagggcctatttcccattatttgcatagaggatgcaagactgtcagagggacgattgcaattaacttggccataaacacaaacctattggcacaaactatgtgatatagaaagttatgattgttcaagaagtttgtaatttaaaaaaaggaccactatgtacttaccgtaactgaaaagtctttcgttttctcaactttatatatcttccggaaaggac

SEQ ID NO: 7395 - DNA, 219 bp, synthetic construct
  misc_feature 1..219: note = promoter
  source 1..219: mol_type = other DNA
gagggcctatttcccatgatttgcatagaggatgcaagactgtcagagggacgattgcaattaacttggccataaacacaaacctattggcacaaactatgtgatatagaaagttatgattgttcaagaagtttgtaatttaaaaaaaggaccactatgtacttaccgtaactgaaaagtctttcgttttctcaactttatatatcttccggaaaggac

SEQ ID NO: 7396 - DNA, 219 bp, synthetic construct
  misc_feature 1..219: note = promoter
  source 1..219: mol_type = other DNA
gagggcctatttcccatggtttgcatagaggatgcaagactgtcagagggacgattgcaattaacttggccataaacacaaacctattggcacaaactatgtgatatagaaagttatgattgttcaagaagtttgtaatttaaaaaaaggaccactatgtacttaccgtaactgaaaagtctttcgttttctcaactttatatatcttccggaaaggac

SEQ ID NO: 7397 - DNA, 219 bp, synthetic construct; identical to SEQ ID NO: 7396
  misc_feature 1..219: note = promoter
  source 1..219: mol_type = other DNA

SEQ ID NO: 7398 - DNA, 219 bp, synthetic construct; identical to SEQ ID NO: 7396
  misc_feature 1..219: note = promoter
  source 1..219: mol_type = other DNA

SEQ ID NO: 7399 - DNA, 219 bp, synthetic construct
  misc_feature 1..219: note = promoter
  source 1..219: mol_type = other DNA
gagggcctatttcccatggttcgcatagaggatgcaagactgtcagagggacgattgcaattaacttggccataaacacaaacctattggcacaaactatgtgatatagaaagttatgattgttcaagaagtttgtaatttaaaaaaaggaccactatgtacttaccgtaactgaaaagtctttcgttttctcaactttatatatcttccggaaaggac

SEQ ID NO: 7400 - DNA, 219 bp, synthetic construct
  misc_feature 1..219: note = promoter
  source 1..219: mol_type = other DNA
gagggcctatttcccatggttcccatagaggatgcaagactgtcagagggacgattgcaattaacttggccataaacacaaacctattggcacaaactatgtgatatagaaagttatgattgttcaagaagtttgtaatttaaaaaaaggaccactatgtacttaccgtaactgaaaagtctttcgttttctcaactttatatatcttccggaaaggac

SEQ ID NO: 7401 - DNA, 219 bp, synthetic construct
  misc_feature 1..219: note = promoter
  source 1..219: mol_type = other DNA
gagggcctatttcccatggttcctatagaggatgcaagactgtcagagggacgattgcaattaacttggccataaacacaaacctattggcacaaactatgtgatatagaaagttatgattgttcaagaagtttgtaatttaaaaaaaggaccactatgtacttaccgtaactgaaaagtctttcgttttctcaactttatatatcttccggaaaggac

SEQ ID NO: 7402 - DNA, 219 bp, synthetic construct
  misc_feature 1..219: note = promoter
  source 1..219: mol_type = other DNA
gagggcctatttcccatggttcctttagaggatgcaagactgtcagagggacgattgcaattaacttggccataaacacaaacctattggcacaaactatgtgatatagaaagttatgattgttcaagaagtttgtaatttaaaaaaaggaccactatgtacttaccgtaactgaaaagtctttcgttttctcaactttatatatcttccggaaaggac

SEQ ID NO: 7403 - DNA, 219 bp, synthetic construct
  misc_feature 1..219: note = promoter
  source 1..219: mol_type = other DNA
gagggcctatttcccatggttccttcagaggatgcaagactgtcagagggacgattgcaattaacttggccataaacacaaacctattggcacaaactatgtgatatagaaagttatgattgttcaagaagtttgtaatttaaaaaaaggaccactatgtacttaccgtaactgaaaagtctttcgttttctcaactttatatatcttccggaaaggac

SEQ ID NO: 7404 - DNA, 219 bp, synthetic construct; identical to SEQ ID NO: 7403
  misc_feature 1..219: note = promoter
  source 1..219: mol_type = other DNA

SEQ ID NO: 7405 - DNA, 219 bp, synthetic construct
  misc_feature 1..219: note = promoter
  source 1..219: mol_type = other DNA
gagggcctatttcccatggttccttcataggatgcaagactgtcagagggacgattgcaattaacttggccataaacacaaacctattggcacaaactatgtgatatagaaagttatgattgttcaagaagtttgtaatttaaaaaaaggaccactatgtacttaccgtaactgaaaagtctttcgttttctcaactttatatatcttccggaaaggac

SEQ ID NO: 7406 - DNA, 219 bp, synthetic construct; identical to SEQ ID NO: 7405
  misc_feature 1..219: note = promoter
  source 1..219: mol_type = other DNA

SEQ ID NO: 7407 - DNA, 219 bp, synthetic construct
  misc_feature 1..219: note = promoter
  source 1..219: mol_type = other DNA
gagggcctatttcccatggttccttcatatgatgcaagactgtcagagggacgattgcaattaacttggccataaacacaaacctattggcacaaactatgtgatatagaaagttatgattgttcaagaagtttgtaatttaaaaaaaggaccactatgtacttaccgtaactgaaaagtctttcgttttctcaactttatatatcttccggaaaggac

SEQ ID NO: 7408 - DNA, 219 bp, synthetic construct
  misc_feature 1..219: note = promoter
  source 1..219: mol_type = other DNA
gagggcctatttcccatggttccttcatattatgcaagactgtcagagggacgattgcaattaacttggccataaacacaaacctattggcacaaactatgtgatatagaaagttatgattgttcaagaagtttgtaatttaaaaaaaggaccactatgtacttaccgtaactgaaaagtctttcgttttctcaactttatatatcttccggaaaggac

SEQ ID NO: 7409 - DNA, 219 bp, synthetic construct
  misc_feature 1..219: note = promoter
  source 1..219: mol_type = other DNA
gagggcctatttcccatggttccttcatattttgcaagactgtcagagggacgattgcaattaacttggccataaacacaaacctattggcacaaactatgtgatatagaaagttatgattgttcaagaagtttgtaatttaaaaaaaggaccactatgtacttaccgtaactgaaaagtctttcgttttctcaactttatatatcttccggaaaggac

SEQ ID NO: 7410 - DNA, 219 bp, synthetic construct
  misc_feature 1..219: note = promoter
  source 1..219: mol_type = other DNA
gagggcctatttcccatggttccttcatatttggcaagactgtcagagggacgattgcaattaacttggccataaacacaaacctattggcacaaactatgtgatatagaaagttatgattgttcaagaagtttgtaatttaaaaaaaggaccactatgtacttaccgtaactgaaaagtctttcgttttctcaactttatatatcttccggaaaggac

SEQ ID NO: 7411 - DNA, 219 bp, synthetic construct
  misc_feature 1..219: note = promoter
  source 1..219: mol_type = other DNA
gagggcctatttcccatggttccttcatatttgccaagactgtcagagggacgattgcaattaacttggccataaacacaaacctattggcacaaactatgtgatatagaaagttatgattgttcaagaagtttgtaatttaaaaaaaggaccactatgtacttaccgtaactgaaaagtctttcgttttctcaactttatatatcttccggaaaggac

SEQ ID NO: 7412 - DNA, 219 bp, synthetic construct
  misc_feature 1..219: note = promoter
  source 1..219: mol_type = other DNA
gagggcctatttcccatggttccttcatatttgcaaagactgtcagagggacgattgcaattaacttggccataaacacaaacctattggcacaaactatgtgatatagaaagttatgattgttcaagaagtttgtaatttaaaaaaaggaccactatgtacttaccgtaactgaaaagtctttcgttttctcaactttatatatcttccggaaaggac

SEQ ID NO: 7413 - DNA, 219 bp, synthetic construct
  misc_feature 1..219: note = promoter
  source 1..219: mol_type = other DNA
gagggcctatttcccatggttccttcatatttgcatagactgtcagagggacgattgcaattaacttggccataaacacaaacctattggcacaaactatgtgatatagaaagttatgattgttcaagaagtttgtaatttaaaaaaaggaccactatgtacttaccgtaactgaaaagtctttcgttttctcaactttatatatcttccggaaaggac

SEQ ID NO: 7414 - DNA, 219 bp, synthetic construct; identical to SEQ ID NO: 7413
  misc_feature 1..219: note = promoter
  source 1..219: mol_type = other DNA

SEQ ID NO: 7415 - DNA, 219 bp, synthetic construct; identical to SEQ ID NO: 7413
  misc_feature 1..219: note = promoter
  source 1..219: mol_type = other DNA

SEQ ID NO: 7416 - DNA, 219 bp, synthetic construct; identical to SEQ ID NO: 7413
  misc_feature 1..219: note = promoter
  source 1..219: mol_type = other DNA

SEQ ID NO: 7417 - DNA, 219 bp, synthetic construct
  misc_feature 1..219: note = promoter
  source 1..219: mol_type = other DNA
gagggcctatttcccatggttccttcatatttgcatagagtgtcagagggacgattgcaattaacttggccataaacacaaacctattggcacaaactatgtgatatagaaagttatgattgttcaagaagtttgtaatttaaaaaaaggaccactatgtacttaccgtaactgaaaagtctttcgttttctcaactttatatatcttccggaaaggac

SEQ ID NO: 7418 - DNA, 219 bp, synthetic construct
  misc_feature 1..219: note = promoter
  source 1..219: mol_type = other DNA
gagggcctatttcccatggttccttcatatttgcatagagggtcagagggacgattgcaattaacttggccataaacacaaacctattggcacaaactatgtgatatagaaagttatgattgttcaagaagtttgtaatttaaaaaaaggaccactatgtacttaccgtaactgaaaagtctttcgttttctcaactttatatatcttccggaaaggac

SEQ ID NO: 7419 - DNA, 219 bp, synthetic construct
  misc_feature 1..219: note = promoter
  source 1..219: mol_type = other DNA
gagggcctatttcccatggttccttcatatttgcatagaggatcagagggacgattgcaattaacttggccataaacacaaacctattggcacaaactatgtgatatagaaagttatgattgttcaagaagtttgtaatttaaaaaaaggaccactatgtacttaccgtaactgaaaagtctttcgttttctcaactttatatatcttccggaaaggac

SEQ ID NO: 7420 - DNA, 219 bp, synthetic construct; identical to SEQ ID NO: 7419
  misc_feature 1..219: note = promoter
  source 1..219: mol_type = other DNA

SEQ ID NO: 7421 - DNA, 219 bp, synthetic construct
  misc_feature 1..219: note = promoter
  source 1..219: mol_type = other DNA
gagggcctatttcccatggttccttcatatttgcatagaggatgagagggacgattgcaattaacttggccataaacacaaacctattggcacaaactatgtgatatagaaagttatgattgttcaagaagtttgtaatttaaaaaaaggaccactatgtacttaccgtaactgaaaagtctttcgttttctcaactttatatatcttccggaaaggac

SEQ ID NO: 7422 - DNA, 219 bp, synthetic construct
  misc_feature 1..219: note = promoter
  source 1..219: mol_type = other DNA
gagggcctatttcccatggttccttcatatttgcatagaggatgcgagggacgattgcaattaacttggccataaacacaaacctattggcacaaactatgtgatatagaaagttatgattgttcaagaagtttgtaatttaaaaaaaggaccactatgtacttaccgtaactgaaaagtctttcgttttctcaactttatatatcttccggaaaggac

SEQ ID NO: 7423 - DNA, 219 bp, synthetic construct
  misc_feature 1..219: note = promoter
  source 1..219: mol_type = other DNA
gagggcctatttcccatggttccttcatatttgcatagaggatgcaagggacgattgcaattaacttggccataaacacaaacctattggcacaaactatgtgatatagaaagttatgattgttcaagaagtttgtaatttaaaaaaaggaccactatgtacttaccgtaactgaaaagtctttcgttttctcaactttatatatcttccggaaaggac

SEQ ID NO: 7424 - DNA, 219 bp, synthetic construct; identical to SEQ ID NO: 7423
  misc_feature 1..219: note = promoter
  source 1..219: mol_type = other DNA

SEQ ID NO: 7425 - DNA, 219 bp, synthetic construct; identical to SEQ ID NO: 7423
  misc_feature 1..219: note = promoter
  source 1..219: mol_type = other DNA

SEQ ID NO: 7426 - DNA, 219 bp, synthetic construct
  misc_feature 1..219: note = promoter
  source 1..219: mol_type = other DNA
gagggcctatttcccatggttccttcatatttgcatagaggatgcaagagacgattgcaattaacttggccataaacacaaacctattggcacaaactatgtgatatagaaagttatgattgttcaagaagtttgtaatttaaaaaaaggaccactatgtacttaccgtaactgaaaagtctttcgttttctcaactttatatatcttccggaaaggac

SEQ ID NO: 7427 - DNA, 219 bp, synthetic construct
  misc_feature 1..219: note = promoter
  source 1..219: mol_type = other DNA
gagggcctatttcccatggttccttcatatttgcatagaggatgcaagacacgattgcaattaacttggccataaacacaaacctattggcacaaactatgtgatatagaaagttatgattgttcaagaagtttgtaatttaaaaaaaggaccactatgtacttaccgtaactgaaaagtctttcgttttctcaactttatatatcttccggaaaggac

SEQ ID NO: 7428 - DNA, 219 bp, synthetic construct
  misc_feature 1..219: note = promoter
  source 1..219: mol_type = other DNA
gagggcctatttcccatggttccttcatatttgcatagaggatgcaagactcgattgcaattaacttggccataaacacaaacctattggcacaaactatgtgatatagaaagttatgattgttcaagaagtttgtaatttaaaaaaaggaccactatgtacttaccgtaactgaaaagtctttcgttttctcaactttatatatcttccggaaaggac

SEQ ID NO: 7429 - DNA, 219 bp, synthetic construct
  misc_feature 1..219: note = promoter
  source 1..219: mol_type = other DNA
gagggcctatttcccatggttccttcatatttgcatagaggatgcaagactggattgcaattaacttggccataaacacaaacctattggcacaaactatgtgatatagaaagttatgattgttcaagaagtttgtaatttaaaaaaaggaccactatgtacttaccgtaactgaaaagtctttcgttttctcaactttatatatcttccggaaaggac

SEQ ID NO: 7430 - DNA, 219 bp, synthetic construct
  misc_feature 1..219: note = promoter
  source 1..219: mol_type = other DNA
gagggcctatttcccatggttccttcatatttgcatagaggatgcaagactgtattgcaattaacttggccataaacacaaacctattggcacaaactatgtgatatagaaagttatgattgttcaagaagtttgtaatttaaaaaaaggaccactatgtacttaccgtaactgaaaagtctttcgttttctcaactttatatatcttccggaaaggac

SEQ ID NO: 7431 - DNA, 219 bp, synthetic construct
  misc_feature 1..219: note = promoter
  source 1..219: mol_type = other DNA
gagggcctatttcccatggttccttcatatttgcatagaggatgcaagactgtcttgcaattaacttggccataaacacaaacctattggcacaaactatgtgatatagaaagttatgattgttcaagaagtttgtaatttaaaaaaaggaccactatgtacttaccgtaactgaaaagtctttcgttttctcaactttatatatcttccggaaaggac

SEQ ID NO: 7432 - DNA, 219 bp, synthetic construct
  misc_feature 1..219: note = promoter
  source 1..219: mol_type = other DNA
gagggcctatttcccatggttccttcatatttgcatagaggatgcaagactgtcatgcaattaacttggccataaacacaaacctattggcacaaactatgtgatatagaaagttatgattgttcaagaagtttgtaatttaaaaaaaggaccactatgtacttaccgtaactgaaaagtctttcgttttctcaactttatatatcttccggaaaggac

SEQ ID NO: 7433 - DNA, 219 bp, synthetic construct
  misc_feature 1..219: note = promoter
  source 1..219: mol_type = other DNA
gagggcctatttcccatggttccttcatatttgcatagaggatgcaagactgtcaggcaattaacttggccataaacacaaacctattggcacaaactatgtgatatagaaagttatgattgttcaagaagtttgtaatttaaaaaaaggaccactatgtacttaccgtaactgaaaagtctttcgttttctcaactttatatatcttccggaaaggac

SEQ ID NO: 7434 - DNA, 219 bp, synthetic construct
  misc_feature 1..219: note = promoter
  source 1..219: mol_type = other DNA
gagggcctatttcccatggttccttcatatttgcatagaggatgcaagactgtcagacaattaacttggccataaacacaaacctattggcacaaactatgtgatatagaaagttatgattgttcaagaagtttgtaatttaaaaaaaggaccactatgtacttaccgtaactgaaaagtctttcgttttctcaactttatatatcttccggaaaggac

SEQ ID NO: 7435 - DNA, 219 bp, synthetic construct
  misc_feature 1..219: note = promoter
  source 1..219: mol_type = other DNA
gagggcctatttcccatggttccttcatatttgcatagaggatgcaagactgtcagagaattaacttggccataaacacaaacctattggcacaaactatgtgatatagaaagttatgattgttcaagaagtttgtaatttaaaaaaaggaccactatgtacttaccgtaactgaaaagtctttcgttttctcaactttatatatcttccggaaaggac

SEQ ID NO: 7436 - DNA, 219 bp, synthetic construct
  misc_feature 1..219: note = promoter
  source 1..219: mol_type = other DNA
gagggcctatttcccatggttccttcatatttgcatagaggatgcaagactgtcagaggattaacttggccataaacacaaacctattggcacaaactatgtgatatagaaagttatgattgttcaagaagtttgtaatttaaaaaaaggaccactatgtacttaccgtaactgaaaagtctttcgttttctcaactttatatatcttccggaaaggac

SEQ ID NO: 7437 - DNA, 219 bp, synthetic construct
  misc_feature 1..219: note = promoter
  source 1..219: mol_type = other DNA
gagggcctatttcccatggttccttcatatttgcatagaggatgcaagactgtcagagggttaacttggccataaacacaaacctattggcacaaactatgtgatatagaaagttatgattgttcaagaagtttgtaatttaaaaaaaggaccactatgtacttaccgtaactgaaaagtctttcgttttctcaactttatatatcttccggaaaggac

SEQ ID NO: 7438 - DNA, 219 bp, synthetic construct
  misc_feature 1..219: note = promoter
  source 1..219: mol_type = other DNA
gagggcctatttcccatggttccttcatatttgcatagaggatgcaagactgtcagagggataacttggccataaacacaaacctattggcacaaactatgtgatatagaaagttatgattgttcaagaagtttgtaatttaaaaaaaggaccactatgtacttaccgtaactgaaaagtctttcgttttctcaactttatatatcttccggaaaggac

SEQ ID NO: 7439 - DNA, 219 bp, synthetic construct
  misc_feature 1..219: note = promoter
  source 1..219: mol_type = other DNA
gagggcctatttcccatggttccttcatatttgcatagaggatgcaagactgtcagagggacaacttggccataaacacaaacctattggcacaaactatgtgatatagaaagttatgattgttcaagaagtttgtaatttaaaaaaaggaccactatgtacttaccgtaactgaaaagtctttcgttttctcaactttatatatcttccggaaaggac

SEQ ID NO: 7440 - DNA, 219 bp, synthetic construct
  misc_feature 1..219: note = promoter
  source 1..219: mol_type = other DNA
gagggcctatttcccatggttccttcatatttgcatagaggatgcaagactgtcagagggacgacttggccataaacacaaacctattggcacaaactatgtgatatagaaagttatgattgttcaagaagtttgtaatttaaaaaaaggaccactatgtacttaccgtaactgaaaagtctttcgttttctcaactttatatatcttccggaaaggac

SEQ ID NO: 7441 - DNA, 219 bp, synthetic construct; identical to SEQ ID NO: 7440
  misc_feature 1..219: note = promoter
  source 1..219: mol_type = other DNA

SEQ ID NO: 7442 - DNA, 219 bp, synthetic construct
  misc_feature 1..219: note = promoter
  source 1..219: mol_type = other DNA
gagggcctatttcccatggttccttcatatttgcatagaggatgcaagactgtcagagggacgatttggccataaacacaaacctattggcacaaactatgtgatatagaaagttatgattgttcaagaagtttgtaatttaaaaaaaggaccactatgtacttaccgtaactgaaaagtctttcgttttctcaactttatatatcttccggaaaggac

SEQ ID NO: 7443 - DNA, 219 bp, synthetic construct; identical to SEQ ID NO: 7442
  misc_feature 1..219: note = promoter
  source 1..219: mol_type = other DNA

SEQ ID NO: 7444 - DNA, 219 bp, synthetic construct
  misc_feature 1..219: note = promoter
  source 1..219: mol_type = other DNA
gagggcctatttcccatggttccttcatatttgcatagaggatgcaagactgtcagagggacgattgggccataaacacaaacctattggcacaaactatgtgatatagaaagttatgattgttcaagaagtttgtaatttaaaaaaaggaccactatgtacttaccgtaactgaaaagtctttcgttttctcaactttatatatcttccggaaaggac

SEQ ID NO: 7445 - DNA, 219 bp, synthetic construct
  misc_feature 1..219: note = promoter
  source 1..219: mol_type = other DNA
gagggcctatttcccatggttccttcatatttgcatagaggatgcaagactgtcagagggacgattgcgccataaacacaaacctattggcacaaactatgtgatatagaaagttatgattgttcaagaagtttgtaatttaaaaaaaggaccactatgtacttaccgtaactgaaaagtctttcgttttctcaactttatatatcttccggaaaggac

SEQ ID NO: 7446 - DNA, 219 bp, synthetic construct
  misc_feature 1..219: note = promoter
  source 1..219: mol_type = other DNA
gagggcctatttcccatggttccttcatatttgcatagaggatgcaagactgtcagagggacgattgcaccataaacacaaacctattggcacaaactatgtgatatagaaagttatgattgttcaagaagtttgtaatttaaaaaaaggaccactatgtacttaccgtaactgaaaagtctttcgttttctcaactttatatatcttccggaaaggac

SEQ ID NO: 7447 - DNA, 219 bp, synthetic construct
  misc_feature 1..219: note = promoter
  source 1..219: mol_type = other DNA
gagggcctatttcccatggttccttcatatttgcatagaggatgcaagactgtcagagggacgattgcaacataaacacaaacctattggcacaaactatgtgatatagaaagttatgattgttcaagaagtttgtaatttaaaaaaaggaccactatgtacttaccgtaactgaaaagtctttcgttttctcaactttatatatcttccggaaaggac

SEQ ID NO: 7448 - DNA, 219 bp, synthetic construct
  misc_feature 1..219: note = promoter
  source 1..219: mol_type = other DNA
gagggcctatttcccatggttccttcatatttgcatagaggatgcaagactgtcagagggacgattgcaatataaacacaaacctattggcacaaactatgtgatatagaaagttatgattgttcaagaagtttgtaatttaaaaaaaggaccactatgtacttaccgtaactgaaaagtctttcgttttctcaactttatatatcttccggaaaggac

SEQ ID NO: 7449 - DNA, 219 bp, synthetic construct
  misc_feature 1..219: note = promoter
  source 1..219: mol_type = other DNA
gagggcctatttcccatggttccttcatatttgcatagaggatgcaagactgtcagagggacgattgcaatttaaacacaaacctattggcacaaactatgtgatatagaaagttatgattgttcaagaagtttgtaatttaaaaaaaggaccactatgtacttaccgtaactgaaaagtctttcgttttctcaactttatatatcttccggaaaggac

SEQ ID NO: 7450 - DNA, 219 bp, synthetic construct
  misc_feature 1..219: note = promoter
  source 1..219: mol_type = other DNA
gagggcctatttcccatggttccttcatatttgcatagaggatgcaagactgtcagagggacgattgcaattaaaacacaaacctattggcacaaactatgtgatatagaaagttatgattgttcaagaagtttgtaatttaaaaaaaggaccactatgtacttaccgtaactgaaaagtctttcgttttctcaactttatatatcttccggaaaggac

SEQ ID NO: 7451 - DNA, 219 bp, synthetic construct; identical to SEQ ID NO: 7450
  misc_feature 1..219: note = promoter
  source 1..219: mol_type = other DNA

SEQ ID NO: 7452 - DNA, 219 bp, synthetic construct
  misc_feature 1..219: note = promoter
  source 1..219: mol_type = other DNA
gagggcctatttcccatggttccttcatatttgcatagaggatgcaagactgtcagagggacgattgcaattaacacacaaacctattggcacaaactatgtgatatagaaagttatgattgttcaagaagtttgtaatttaaaaaaaggaccactatgtacttaccgtaactgaaaagtctttcgttttctcaactttatatatcttccggaaaggac

SEQ ID NO: 7453 - DNA, 219 bp, synthetic construct
  misc_feature 1..219: note = promoter
  source 1..219: mol_type = other DNA
gagggcctatttcccatggttccttcatatttgcatagaggatgcaagactgtcagagggacgattgcaattaactcacaaacctattggcacaaactatgtgatatagaaagttatgattgttcaagaagtttgtaatttaaaaaaaggaccactatgtacttaccgtaactgaaaagtctttcgttttctcaactttatatatcttccggaaaggac

SEQ ID NO: 7454 - DNA, 219 bp, synthetic construct
  misc_feature 1..219: note = promoter
  source 1..219: mol_type = other DNA
gagggcctatttcccatggttccttcatatttgcatagaggatgcaagactgtcagagggacgattgcaattaacttacaaacctattggcacaaactatgtgatatagaaagttatgattgttcaagaagtttgtaatttaaaaaaaggaccactatgtacttaccgtaactgaaaagtctttcgttttctcaactttatatatcttccggaaaggac

SEQ ID NO: 7455 - DNA, 219 bp, synthetic construct
  misc_feature 1..219: note = promoter
  source 1..219: mol_type = other DNA
gagggcctatttcccatggttccttcatatttgcatagaggatgcaagactgtcagagggacgattgcaattaacttgcaaacctattggcacaaactatgtgatatagaaagttatgattgttcaagaagtttgtaatttaaaaaaaggaccactatgtacttaccgtaactgaaaagtctttcgttttctcaactttatatatcttccggaaaggac

SEQ ID NO: 7456 - DNA, 219 bp, synthetic construct
  misc_feature 1..219: note = promoter
  source 1..219: mol_type = other DNA
gagggcctatttcccatggttccttcatatttgcatagaggatgcaagactgtcagagggacgattgcaattaacttggaaacctattggcacaaactatgtgatatagaaagttatgattgttcaagaagtttgtaatttaaaaaaaggaccactatgtacttaccgtaactgaaaagtctttcgttttctcaactttatatatcttccggaaaggac

SEQ ID NO: 7457 - DNA, 219 bp, synthetic construct
  misc_feature 1..219: note = promoter
  source 1..219: mol_type = other DNA
gagggcctatttcccatggttccttcatatttgcatagaggatgcaagactgtcagagggacgattgcaattaacttggcaacctattggcacaaactatgtgatatagaaagttatgattgttcaagaagtttgtaatttaaaaaaaggaccactatgtacttaccgtaactgaaaagtctttcgttttctcaactttatatatcttccggaaaggac

SEQ ID NO: 7458 - DNA, 219 bp, synthetic construct
  misc_feature 1..219: note = promoter
  source 1..219: mol_type = other DNA
gagggcctatttcccatggttccttcatatttgcatagaggatgcaagactgtcagagggacgattgcaattaacttggccacctattggcacaaactatgtgatatagaaagttatgattgttcaagaagtttgtaatttaaaaaaaggaccactatgtacttaccgtaactgaaaagtctttcgttttctcaactttatatatcttccggaaaggac

SEQ ID NO: 7459 - DNA, 219 bp, synthetic construct; identical to SEQ ID NO: 7458
  misc_feature 1..219: note = promoter
  source 1..219: mol_type = other DNA

SEQ ID NO: 7460 - DNA, 219 bp, synthetic construct
  misc_feature 1..219: note = promoter
  source 1..219: mol_type = other DNA
gagggcctatttcccatggttccttcatatttgcatagaggatgcaagactgtcagagggacgattgcaattaacttggccatctattggcacaaactatgtgatatagaaagttatgattgttcaagaagtttgtaatttaaaaaaaggaccactatgtacttaccgtaactgaaaagtctttcgttttctcaactttatatatcttccggaaaggac

SEQ ID NO: 7461 - DNA, 219 bp, synthetic construct
  misc_feature 1..219: note = promoter
  source 1..219: mol_type = other DNA
gagggcctatttcccatggttccttcatatttgcatagaggatgcaagactgtcagagggacgattgcaattaacttggccatatattggcacaaactatgtgatatagaaagttatgattgttcaagaagtttgtaatttaaaaaaaggaccactatgtacttaccgtaactgaaaagtctttcgttttctcaactttatatatcttccggaaaggac

SEQ ID NO: 7462 - DNA, 219 bp, synthetic construct
  misc_feature 1..219: note = promoter
  source 1..219: mol_type = other DNA
gagggcctatttcccatggttccttcatatttgcatagaggatgcaagactgtcagagggacgattgcaattaacttggccataaattggcacaaactatgtgatatagaaagttatgattgttcaagaagtttgtaatttaaaaaaaggaccactatgtacttaccgtaactgaaaagtctttcgttttctcaactttatatatcttccggaaaggac

SEQ ID NO: 7463 - DNA, 219 bp, synthetic construct; identical to SEQ ID NO: 7462
  misc_feature 1..219: note = promoter
  source 1..219: mol_type = other DNA

SEQ ID NO: 7464 - DNA, 219 bp, synthetic construct
  misc_feature 1..219: note = promoter
  source 1..219: mol_type = other DNA
gagggcctatttcccatggttccttcatatttgcatagaggatgcaagactgtcagagggacgattgcaattaacttggccataaactggcacaaactatgtgatatagaaagttatgattgttcaagaagtttgtaatttaaaaaaaggaccactatgtacttaccgtaactgaaaagtctttcgttttctcaactttatatatcttccggaaaggac

SEQ ID NO: 7465 - DNA, 219 bp, synthetic construct
  misc_feature 1..219: note = promoter
  source 1..219: mol_type = other DNA
gagggcctatttcccatggttccttcatatttgcatagaggatgcaagactgtcagagggacgattgcaattaacttggccataaacaggcacaaactatgtgatatagaaagttatgattgttcaagaagtttgtaatttaaaaaaaggaccactatgtacttaccgtaactgaaaagtctttcgttttctcaactttatatatcttccggaaaggac

SEQ ID NO: 7466 - DNA, 219 bp, synthetic construct
  misc_feature 1..219: note = promoter
  source 1..219: mol_type = other DNA
gagggcctatttcccatggttccttcatatttgcatagaggatgcaagactgtcagagggacgattgcaattaacttggccataaacacgcacaaactatgtgatatagaaagttatgattgttcaagaagtttgtaatttaaaaaaaggaccactatgtacttaccgtaactgaaaagtctttcgttttctcaactttatatatcttccggaaaggac

SEQ ID NO: 7467 - DNA, 219 bp, synthetic construct
  misc_feature 1..219: note = promoter
  source 1..219: mol_type = other DNA
gagggcctatttcccatggttccttcatatttgcatagaggatgcaagactgtcagagggacgattgcaattaacttggccataaacacacacaaactatgtgatatagaaagttatgattgttcaagaagtttgtaatttaaaaaaaggaccactatgtacttaccgtaactgaaaagtctttcgttttctcaactttatatatcttccggaaaggac

SEQ ID NO: 7468 - DNA, 219 bp, synthetic construct
  misc_feature 1..219: note = promoter
  source 1..219: mol_type = other DNA
gagggcctatttcccatggttccttcatatttgcatagaggatgcaagactgtcagagggacgattgcaattaacttggccataaacacaaacaaactatgtgatatagaaagttatgattgttcaagaagtttgtaatttaaaaaaaggaccactatgtacttaccgtaactgaaaagtctttcgttttctcaactttatatatcttccggaaaggac

SEQ ID NO: 7469 - DNA, 219 bp, synthetic construct; identical to SEQ ID NO: 7468
  misc_feature 1..219: note = promoter
  source 1..219: mol_type = other DNA

SEQ ID NO: 7470 - DNA, 219 bp, synthetic construct; identical to SEQ ID NO: 7468
  misc_feature 1..219: note = promoter
  source 1..219: mol_type = other DNA

SEQ ID NO: 7471 - DNA, 219 bp, synthetic construct
  misc_feature 1..219: note = promoter
  source 1..219: mol_type = other DNA
gagggcctatttcccatggttccttcatatttgcatagaggatgcaagactgtcagagggacgattgcaattaacttggccataaacacaaaccaactatgtgatatagaaagttatgattgttcaagaagtttgtaatttaaaaaaaggaccactatgtacttaccgtaactgaaaagtctttcgttttctcaactttatatatcttccggaaaggac

SEQ ID NO: 7472 - DNA, 219 bp, synthetic construct
  misc_feature 1..219: note = promoter
  source 1..219: mol_type = other DNA
gagggcctatttcccatggttccttcatatttgcatagaggatgcaagactgtcagagggacgattgcaattaacttggccataaacacaaacctactatgtgatatagaaagttatgattgttcaagaagtttgtaatttaaaaaaaggaccactatgtacttaccgtaactgaaaagtctttcgttttctcaactttatatatcttccggaaaggac

SEQ ID NO: 7473 - DNA, 219 bp, synthetic construct; identical to SEQ ID NO: 7472
  misc_feature 1..219: note = promoter
  source 1..219: mol_type = other DNA

SEQ ID NO: 7474 - DNA, 219 bp, synthetic construct
  misc_feature 1..219: note = promoter
  source 1..219: mol_type = other DNA
gagggcctatttcccatggttccttcatatttgcatagaggatgcaagactgtcagagggacgattgcaattaacttggccataaacacaaacctattatgtgatatagaaagttatgattgttcaagaagtttgtaatttaaaaaaaggaccactatgtacttaccgtaactgaaaagtctttcgttttctcaactttatatatcttccggaaaggac

SEQ ID NO: 7475 - DNA, 219 bp, synthetic construct; identical to SEQ ID NO: 7474
  misc_feature 1..219: note = promoter
  source 1..219: mol_type = other DNA

SEQ ID NO: 7476 - DNA, 219 bp, synthetic construct
  misc_feature 1..219: note = promoter
  source 1..219: mol_type = other DNA
gagggcctatttcccatggttccttcatatttgcatagaggatgcaagactgtcagagggacgattgcaattaacttggccataaacacaaacctattgtgtgatatagaaagttatgattgttcaagaagtttgtaatttaaaaaaaggaccactatgtacttaccgtaactgaaaagtctttcgttttctcaactttatatatcttccggaaaggac

SEQ ID NO: 7477 - DNA, 219 bp, synthetic construct
  misc_feature 1..219: note = promoter
  source 1..219: mol_type = other DNA
gagggcctatttcccatggttccttcatatttgcatagaggatgcaagactgtcagagggacgattgcaattaacttggccataaacacaaacctattgggtgatatagaaagttatgattgttcaagaagtttgtaatttaaaaaaaggaccactatgtacttaccgtaactgaaaagtctttcgttttctcaactttatatatcttccggaaaggac

SEQ ID NO: 7478 - DNA, 219 bp, synthetic construct
  misc_feature 1..219: note = promoter
  source 1..219: mol_type = other DNA
gagggcctatttcccatggttccttcatatttgcatagaggatgcaagactgtcagagggacgattgcaattaacttggccataaacacaaacctattggctgatatagaaagttatgattgttcaagaagtttgtaatttaaaaaaaggaccactatgtacttaccgtaactgaaaagtctttcgttttctcaactttatatatcttccggaaaggac

SEQ ID NO: 7479 - DNA, 219 bp, synthetic construct
  misc_feature 1..219: note = promoter
  source 1..219: mol_type = other DNA
gagggcctatttcccatggttccttcatatttgcatagaggatgcaagactgtcagagggacgattgcaattaacttggccataaacacaaacctattggcagatatagaaagttatgattgttcaagaagtttgtaatttaaaaaaaggaccactatgtacttaccgtaactgaaaagtctttcgttttctcaactttatatatcttccggaaaggac

SEQ ID NO: 7480 - DNA, 219 bp, synthetic construct
  misc_feature 1..219: note = promoter
  source 1..219: mol_type = other DNA
gagggcctatttcccatggttccttcatatttgcatagaggatgcaagactgtcagagggacgattgcaattaacttggccataaacacaaacctattggcacatatagaaagttatgattgttcaagaagtttgtaatttaaaaaaaggaccactatgtacttaccgtaactgaaaagtctttcgttttctcaactttatatatcttccggaaaggac

SEQ ID NO: 7481 - DNA, 219 bp, synthetic construct; identical to SEQ ID NO: 7480
  misc_feature 1..219: note = promoter
  source 1..219: mol_type = other DNA

SEQ ID NO: 7482 - DNA, 219 bp, synthetic construct
  misc_feature 1..219: note = promoter
  source 1..219: mol_type = other DNA
gagggcctatttcccatggttccttcatatttgcatagaggatgcaagactgtcagagggacgattgcaattaacttggccataaacacaaacctattggcacaaatagaaagttatgattgttcaagaagtttgtaatttaaaaaaaggaccactatgtacttaccgtaactgaaaagtctttcgttttctcaactttatatatcttccggaaaggac

SEQ ID NO: 7483 - DNA, 219 bp, synthetic construct; identical to SEQ ID NO: 7482
  misc_feature 1..219: note = promoter
  source 1..219: mol_type = other DNA

SEQ ID NO: 7484 - DNA, 219 bp, synthetic construct
  misc_feature 1..219: note = promoter
  source 1..219: mol_type = other DNA
gagggcctatttcccatggttccttcatatttgcatagaggatgcaagactgtcagagggacgattgcaattaacttggccataaacacaaacctattggcacaaacagaaagttatgattgttcaagaagtttgtaatttaaaaaaaggaccactatgtacttaccgtaactgaaaagtctttcgttttctcaactttatatatcttccggaaaggac

SEQ ID NO: 7485 - DNA, 219 bp, synthetic construct
  misc_feature 1..219: note = promoter
  source 1..219: mol_type = other DNA
gagggcctatttcccatggttccttcatatttgcatagaggatgcaagactgtcagagggacgattgcaattaacttggccataaacacaaacctattggcacaaactgaaagttatgattgttcaagaagtttgtaatttaaaaaaaggaccactatgtacttaccgtaactgaaaagtctttcgttttctcaactttatatatcttccggaaaggac

SEQ ID NO: 7486 - DNA, 219 bp, synthetic construct
  misc_feature 1..219: note = promoter
  source 1..219: mol_type = other DNA
gagggcctatttcccatggttccttcatatttgcatagaggatgcaagactgtcagagggacgattgcaattaacttggccataaacacaaacctattggcacaaactaaaagttatgattgttcaagaagtttgtaatttaaaaaaaggaccactatgtacttaccgtaactgaaaagtctttcgttttctcaactttatatatcttccggaaaggac

SEQ ID NO: 7487 - DNA, 219 bp, synthetic construct
  misc_feature 1..219: note = promoter
  source 1..219: mol_type = other DNA
gagggcctatttcccatggttccttcatatttgcatagaggatgcaagactgtcagagggacgattgcaattaacttggccataaacacaaacctattggcacaaactataagttatgattgttcaagaagtttgtaatttaaaaaaaggaccactatgtacttaccgtaactgaaaagtctttcgttttctcaactttatatatcttccggaaaggac

SEQ ID NO: 7488 - DNA, 219 bp, synthetic construct
  misc_feature 1..219: note = promoter
  source 1..219: mol_type = other DNA
gagggcctatttcccatggttccttcatatttgcatagaggatgcaagactgtcagagggacgattgcaattaacttggccataaacacaaacctattggcacaaactatgagttatgattgttcaagaagtttgtaatttaaaaaaaggaccactatgtacttaccgtaactgaaaagtctttcgttttctcaactttatatatcttccggaaaggac

SEQ ID NO: 7489 - DNA, 219 bp, synthetic construct
  misc_feature 1..219: note = promoter
  source 1..219: mol_type = other DNA
gagggcctatttcccatggttccttcatatttgcatagaggatgcaagactgtcagagggacgattgcaattaacttggccataaacacaaacctattggcacaaactatgtgttatgattgttcaagaagtttgtaatttaaaaaaaggaccactatgtacttaccgtaactgaaaagtctttcgttttctcaactttatatatcttccggaaaggac

SEQ ID NO: 7490 - DNA, 219 bp, synthetic construct; identical to SEQ ID NO: 7489
  misc_feature 1..219: note = promoter
  source 1..219: mol_type = other DNA

SEQ ID NO: 7491 - DNA, 219 bp, synthetic construct
  misc_feature 1..219: note = promoter
  source 1..219: mol_type = other DNA
gagggcctatttcccatggttccttcatatttgcatagaggatgcaagactgtcagagggacgattgcaattaacttggccataaacacaaacctattggcacaaactatgtgatatgattgttcaagaagtttgtaatttaaaaaaaggaccactatgtacttaccgtaactgaaaagtctttcgttttctcaactttatatatcttccggaaaggac

SEQ ID NO: 7492 - DNA, 219 bp, synthetic construct; identical to SEQ ID NO: 7491
  misc_feature 1..219: note = promoter
  source 1..219: mol_type = other DNA

SEQ ID NO: 7493 - DNA, 219 bp, synthetic construct; identical to SEQ ID NO: 7491
  misc_feature 1..219: note = promoter
  source 1..219: mol_type = other DNA

SEQ ID NO: 7494 - DNA, 219 bp, synthetic construct; identical to SEQ ID NO: 7491
  misc_feature 1..219: note = promoter
  source 1..219: mol_type = other DNA

SEQ ID NO: 7495 - DNA, 219 bp, synthetic construct
  misc_feature 1..219: note = promoter
  source 1..219: mol_type = other DNA
gagggcctatttcccatggttccttcatatttgcatagaggatgcaagactgtcagagggacgattgcaattaacttggccataaacacaaacctattggcacaaactatgtgatataattgttcaagaagtttgtaatttaaaaaaaggaccactatgtacttaccgtaactgaaaagtctttcgttttctcaactttatatatcttccggaaaggac

SEQ ID NO: 7496 - DNA, 219 bp, synthetic construct
  misc_feature 1..219: note = promoter
  source 1..219: mol_type = other DNA
gagggcctatttcccatggttccttcatatttgcatagaggatgcaagactgtcagagggacgattgcaattaacttggccataaacacaaacctattggcacaaactatgtgatatagttgttcaagaagtttgtaatttaaaaaaaggaccactatgtacttaccgtaactgaaaagtctttcgttttctcaactttatatatcttccggaaaggac

SEQ ID NO: 7497 - DNA, 219 bp, synthetic construct
  misc_feature 1..219: note = promoter
  source 1..219: mol_type = other DNA
gagggcctatttcccatggttccttcatatttgcatagaggatgcaagactgtcagagggacgattgcaattaacttggccataaacacaaacctattggcacaaactatgtgatatagatgttcaagaagtttgtaatttaaaaaaaggaccactatgtacttaccgtaactgaaaagtctttcgttttctcaactttatatatcttccggaaaggac

SEQ ID NO: 7498 - DNA, 219 bp, synthetic construct
  misc_feature 1..219: note = promoter
  source 1..219: mol_type = other DNA
gagggcctatttcccatggttccttcatatttgcatagaggatgcaagactgtcagagggacgattgcaattaacttggccataaacacaaacctattggcacaaactatgtgatatagaagttcaagaagtttgtaatttaaaaaaaggaccactatgtacttaccgtaactgaaaagtctttcgttttctcaactttatatatcttccggaaaggac

SEQ ID NO: 7499 - DNA, 219 bp, synthetic construct
  misc_feature 1..219: note = promoter
  source 1..219: mol_type = other DNA
gagggcctatttcccatggttccttcatatttgcatagaggatgcaagactgtcagagggacgattgcaattaacttggccataaacacaaacctattggcacaaactatgtgatatagaaattcaagaagtttgtaatttaaaaaaaggaccactatgtacttaccgtaactgaaaagtctttcgttttctcaactttatatatcttccggaaaggac

SEQ ID NO: 7500 - DNA, 219 bp, synthetic construct
  misc_feature 1..219: note = promoter
  source 1..219: mol_type = other DNA
gagggcctatttcccatggttccttcatatttgcatagaggatgcaagactgtcagagggacgattgcaattaacttggccataaacacaaacctattggcacaaactatgtgatatagaaagtcaagaagtttgtaatttaaaaaaaggaccactatgtacttaccgtaactgaaaagtctttcgttttctcaactttatatatcttccggaaaggac

SEQ ID NO: 7501 - DNA, 219 bp, synthetic construct; identical to SEQ ID NO: 7500
  misc_feature 1..219: note = promoter
  source 1..219: mol_type = other DNA

SEQ ID NO: 7502 - DNA, 219 bp, synthetic construct
  misc_feature 1..219: note = promoter
  source 1..219: mol_type = other DNA
gagggcctatttcccatggttccttcatatttgcatagaggatgcaagactgtcagagggacgattgcaattaacttggccataaacacaaacctattggcacaaactatgtgatatagaaagttaagaagtttgtaatttaaaaaaaggaccactatgtacttaccgtaactgaaaagtctttcgttttctcaactttatatatcttccggaaaggac

SEQ ID NO: 7503 - DNA, 219 bp, synthetic construct; identical to SEQ ID NO: 7502
  misc_feature 1..219: note = promoter
  source 1..219: mol_type = other DNA

SEQ ID NO: 7504 - DNA, 219 bp, synthetic construct
  misc_feature 1..219: note = promoter
  source 1..219: mol_type = other DNA
gagggcctatttcccatggttccttcatatttgcatagaggatgcaagactgtcagagggacgattgcaattaacttggccataaacacaaacctattggcacaaactatgtgatatagaaagttatgaagtttgtaatttaaaaaaaggaccactatgtacttaccgtaactgaaaagtctttcgttttctcaactttatatatcttccggaaaggac

SEQ ID NO: 7505 - DNA, 219 bp, synthetic construct; identical to SEQ ID NO: 7504
  misc_feature 1..219: note = promoter
  source 1..219: mol_type = other DNA

SEQ ID NO: 7506 - DNA, 219 bp, synthetic construct; identical to SEQ ID NO: 7504
  misc_feature 1..219: note = promoter
  source 1..219: mol_type = other DNA

SEQ ID NO: 7507 - DNA, 219 bp, synthetic construct
  misc_feature 1..219: note = promoter
  source 1..219: mol_type = other DNA
gagggcctatttcccatggttccttcatatttgcatagaggatgcaagactgtcagagggacgattgcaattaacttggccataaacacaaacctattggcacaaactatgtgatatagaaagttatgatgtttgtaatttaaaaaaaggaccactatgtacttaccgtaactgaaaagtctttcgttttctcaactttatatatcttccggaaaggac

SEQ ID NO: 7508 - DNA, 219 bp, synthetic construct
  misc_feature 1..219: note = promoter
  source 1..219: mol_type = other DNA
gagggcctatttcccatggttccttcatatttgcatagaggatgcaagactgtcagagggacgattgcaattaacttggccataaacacaaacctattggcacaaactatgtgatatagaaagttatgatttttgtaatttaaaaaaaggaccactatgtacttaccgtaactgaaaagtctttcgttttctcaactttatatatcttccggaaaggac

SEQ ID NO: 7509 - DNA, 219 bp, synthetic construct
  misc_feature 1..219: note = promoter
  source 1..219: mol_type = other DNA
gagggcctatttcccatggttccttcatatttgcatagaggatgcaagactgtcagagggacgattgcaattaacttggccataaacacaaacctattggcacaaactatgtgatatagaaagttatgattgttgtaatttaaaaaaaggaccactatgtacttaccgtaactgaaaagtctttcgttttctcaactttatatatcttccggaaaggac

SEQ ID NO: 7510 - DNA, 219 bp, synthetic construct; identical to SEQ ID NO: 7509
  misc_feature 1..219: note = promoter
  source 1..219: mol_type = other DNA

SEQ ID NO: 7511 - DNA, 219 bp, synthetic construct; identical to SEQ ID NO: 7509
  misc_feature 1..219: note = promoter
  source 1..219: mol_type = other DNA

SEQ ID NO: 7512 - DNA, 219 bp, synthetic construct
  misc_feature 1..219: note = promoter
  source 1..219: mol_type = other DNA
gagggcctatttcccatggttccttcatatttgcatagaggatgcaagactgtcagagggacgattgcaattaacttggccataaacacaaacctattggcacaaactatgtgatatagaaagttatgattgttctaatttaaaaaaaggaccactatgtacttaccgtaactgaaaagtctttcgttttctcaactttatatatcttccggaaaggac

SEQ ID NO: 7513 - DNA, 219 bp, synthetic construct
  misc_feature 1..219: note = promoter
  source 1..219: mol_type = other DNA
gagggcctatttcccatggttccttcatatttgcatagaggatgcaagactgtcagagggacgattgcaattaacttggccataaacacaaacctattggcacaaactatgtgatatagaaagttatgattgttcaaatttaaaaaaaggaccactatgtacttaccgtaactgaaaagtctttcgttttctcaactttatatatcttccggaaaggac

SEQ ID NO: 7514 - DNA, 219 bp, synthetic construct; identical to SEQ ID NO: 7513
  misc_feature 1..219: note = promoter
  source 1..219: mol_type = other DNA

SEQ ID NO: 7515 - DNA, 219 bp, synthetic construct
  misc_feature 1..219: note = promoter
  source 1..219: mol_type = other DNA
gagggcctatttcccatggttccttcatatttgcatagaggatgcaagactgtcagagggacgattgcaattaacttggccataaacacaaacctattggcacaaactatgtgatatagaaagttatgattgttcaagtttaaaaaaaggaccactatgtacttaccgtaactgaaaagtctttcgttttctcaactttatatatcttccggaaaggac

SEQ ID NO: 7516 - DNA, 219 bp, synthetic construct
  misc_feature 1..219: note = promoter
  source 1..219: mol_type = other DNA
gagggcctatttcccatggttccttcatatttgcatagaggatgcaagactgtcagagggacgattgcaattaacttggccataaacacaaacctattggcacaaactatgtgatatagaaagttatgattgttcaagattaaaaaaaggaccactatgtacttaccgtaactgaaaagtctttcgttttctcaactttatatatcttccggaaaggac

SEQ ID NO: 7517 - DNA, 219 bp, synthetic construct
  misc_feature 1..219: note = promoter
  source 1..219: mol_type = other DNA
gagggcctatttcccatggttccttcatatttgcatagaggatgcaagactgtcagagggacgattgcaattaacttggccataaacacaaacctattggcacaaactatgtgatatagaaagttatgattgttcaagaataaaaaaaggaccactatgtacttaccgtaactgaaaagtctttcgttttctcaactttatatatcttccggaaaggac

SEQ ID NO: 7518 - DNA, 219 bp, synthetic construct
  misc_feature 1..219: note = promoter
  source 1..219: mol_type = other DNA
gagggcctatttcccatggttccttcatatttgcatagaggatgcaagactgtcagagggacgattgcaattaacttggccataaacacaaacctattggcacaaactatgtgatatagaaagttatgattgttcaagaagaaaaaaaggaccactatgtacttaccgtaactgaaaagtctttcgttttctcaactttatatatcttccggaaaggac

SEQ ID NO: 7519 - DNA, 219 bp, synthetic construct
  misc_feature 1..219: note = promoter
  source 1..219: mol_type = other DNA
gagggcctatttcccatggttccttcatatttgcatagaggatgcaagactgtcagagggacgattgcaattaacttggccataaacacaaacctattggcacaaactatgtgatatagaaagttatgattgttcaagaagtaaaaaaggaccactatgtacttaccgtaactgaaaagtctttcgttttctcaactttatatatcttccggaaaggac

SEQ ID NO: 7520 - DNA, 219 bp, synthetic construct
  misc_feature 1..219: note = promoter
  source 1..219: mol_type = other DNA
gagggcctatttcccatggttccttcatatttgcatagaggatgcaagactgtcagagggacgattgcaattaacttggccataaacacaaacctattggcacaaactatgtgatatagaaagttatgattgttcaagaagttaaaaaggaccactatgtacttaccgtaactgaaaagtctttcgttttctcaactttatatatcttccggaaaggac

SEQ ID NO: 7521 - DNA, 219 bp, synthetic construct
  misc_feature 1..219: note = promoter
  source 1..219: mol_type = other DNA
gagggcctatttcccatggttccttcatatttgcatagaggatgcaagactgtcagagggacgattgcaattaacttggccataaacacaaacctattggcacaaactatgtgatatagaaagttatgattgttcaagaagtttaaaaggaccactatgtacttaccgtaactgaaaagtctttcgttttctcaactttatatatcttccggaaaggac

SEQ ID NO: 7522 - DNA, 219 bp, synthetic construct
  misc_feature 1..219: note = promoter
  source 1..219: mol_type = other DNA
gagggcctatttcccatggttccttcatatttgcatagaggatgcaagactgtcagagggacgattgcaattaacttggccataaacacaaacctattggcacaaactatgtgatatagaaagttatgattgttcaagaagtttgaaaggaccactatgtacttaccgtaactgaaaagtctttcgttttctcaactttatatatcttccggaaaggac

SEQ ID NO: 7523 - DNA, 219 bp, synthetic construct
  misc_feature 1..219: note = promoter
  source 1..219: mol_type = other DNA
gagggcctatttcccatggttccttcatatttgcatagaggatgcaagactgtcagagggacgattgcaattaacttggccataaacacaaacctattggcacaaactatgtgatatagaaagttatgattgttcaagaagtttgtaaggaccactatgtacttaccgtaactgaaaagtctttcgttttctcaactttatatatcttccggaaaggac

SEQ ID NO: 7524 - DNA, 219 bp, synthetic construct; identical to SEQ ID NO: 7523
  misc_feature 1..219: note = promoter
  source 1..219: mol_type = other DNA

SEQ ID NO: 7525 - DNA, 219 bp, synthetic construct; identical to SEQ ID NO: 7523
  misc_feature 1..219: note = promoter
  source 1..219: mol_type = other DNA

SEQ ID NO: 7526 - DNA, 219 bp, synthetic construct
  misc_feature 1..219: note = promoter
  source 1..219: mol_type = other DNA
gagggcctatttcccatggttccttcatatttgcatagaggatgcaagactgtcagagggacgattgcaattaacttggccataaacacaaacctattggcacaaactatgtgatatagaaagttatgattgttcaagaagtttgtaatgaccactatgtacttaccgtaactgaaaagtctttcgttttctcaactttatatatcttccggaaaggac

SEQ ID NO: 7527 - DNA, 219 bp, synthetic construct
  misc_feature 1..219: note = promoter
  source 1..219: mol_type = other DNA
gagggcctatttcccatggttccttcatatttgcatagaggatgcaagactgtcagagggacgattgcaattaacttggccataaacacaaacctattggcacaaactatgtgatatagaaagttatgattgttcaagaagtttgtaattaccactatgtacttaccgtaactgaaaagtctttcgttttctcaactttatatatcttccggaaaggac

SEQ ID NO: 7528 - DNA, 219 bp, synthetic construct
  misc_feature 1..219: note = promoter
  source 1..219: mol_type = other DNA
gagggcctatttcccatggttccttcatatttgcatagaggatgcaagactgtcagagggacgattgcaattaacttggccataaacacaaacctattggcacaaactatgtgatatagaaagttatgattgttcaagaagtttgtaatttccactatgtacttaccgtaactgaaaagtctttcgttttctcaactttatatatcttccggaaaggac

SEQ ID NO: 7529 - DNA, 219 bp, synthetic construct
  misc_feature 1..219: note = promoter
  source 1..219: mol_type = other DNA
gagggcctatttcccatggttccttcatatttgcatagaggatgcaagactgtcagagggacgattgcaattaacttggccataaacacaaacctattggcacaaactatgtgatatagaaagttatgattgttcaagaagtttgtaatttacactatgtacttaccgtaactgaaaagtctttcgttttctcaactttatatatcttccggaaaggac

SEQ ID NO: 7530 - DNA, 219 bp, synthetic construct
  misc_feature 1..219: note = promoter
  source 1..219: mol_type = other DNA
gagggcctatttcccatggttccttcatatttgcatagaggatgcaagactgtcagagggacgattgcaattaacttggccataaacacaaacctattggcacaaactatgtgatatagaaagttatgattgttcaagaagtttgtaatttaaactatgtacttaccgtaactgaaaagtctttcgttttctcaactttatatatcttccggaaaggac

SEQ ID NO: 7531 - DNA, 219 bp, synthetic construct; identical to SEQ ID NO: 7530
  misc_feature 1..219: note = promoter
  source 1..219: mol_type = other DNA

SEQ ID NO: 7532 - DNA, 219 bp, synthetic construct
  misc_feature 1..219: note = promoter
  source 1..219: mol_type = other DNA
gagggcctatttcccatggttccttcatatttgcatagaggatgcaagactgtcagagggacgattgcaattaacttggccataaacacaaacctattggcacaaactatgtgatatagaaagttatgattgttcaagaagtttgtaatttaaaatatgtacttaccgtaactgaaaagtctttcgttttctcaactttatatatcttccggaaaggac

SEQ ID NO: 7533 - DNA, 219 bp, synthetic construct
  misc_feature 1..219: note = promoter
  source 1..219: mol_type = other DNA
gagggcctatttcccatggttccttcatatttgcatagaggatgcaagactgtcagagggacgattgcaattaacttggccataaacacaaacctattggcacaaactatgtgatatagaaagttatgattgttcaagaagtttgtaatttaaaaaatgtacttaccgtaactgaaaagtctttcgttttctcaactttatatatcttccggaaaggac

SEQ ID NO: 7534 - DNA, 219 bp, synthetic construct; identical to SEQ ID NO: 7533
  misc_feature 1..219: note = promoter
  source 1..219: mol_type = other DNA

SEQ ID NO: 7535 - DNA, 219 bp, synthetic construct
  misc_feature 1..219: note = promoter
  source 1..219: mol_type = other DNA
gagggcctatttcccatggttccttcatatttgcatagaggatgcaagactgtcagagggacgattgcaattaacttggccataaacacaaacctattggcacaaactatgtgatatagaaagttatgattgttcaagaagtttgtaatttaaaaaaagtacttaccgtaactgaaaagtctttcgttttctcaactttatatatcttccggaaaggac

SEQ ID NO: 7536 - DNA, 219 bp, synthetic construct; identical to SEQ ID NO: 7535
  misc_feature 1..219: note = promoter
  source 1..219: mol_type = other DNA

SEQ ID NO: 7537 - DNA, 219 bp, synthetic construct
  misc_feature 1..219: note = promoter
  source 1..219: mol_type = other DNA
gagggcctatttcccatggttccttcatatttgcatagaggatgcaagactgtcagagggacgattgcaattaacttggccataaacacaaacctattggcacaaactatgtgatatagaaagttatgattgttcaagaagtttgtaatttaaaaaaaggacttaccgtaactgaaaagtctttcgttttctcaactttatatatcttccggaaaggac

SEQ ID NO: 7538 - DNA, 219 bp, synthetic construct; identical to SEQ ID NO: 7537
  misc_feature 1..219: note = promoter
  source 1..219: mol_type = other DNA

SEQ ID NO: 7539 - DNA, 219 bp, synthetic construct; identical to SEQ ID NO: 7537
  misc_feature 1..219: note = promoter
  source 1..219: mol_type = other DNA

SEQ ID NO: 7540 - DNA, 219 bp, synthetic construct
  misc_feature 1..219: note = promoter
  source 1..219: mol_type = other DNA
gagggcctatttcccatggttccttcatatttgcatagaggatgcaagactgtcagagggacgattgcaattaacttggccataaacacaaacctattggcacaaactatgtgatatagaaagttatgattgttcaagaagtttgtaatttaaaaaaaggacctaccgtaactgaaaagtctttcgttttctcaactttatatatcttccggaaaggac

SEQ ID NO: 7541 - DNA, 219 bp, synthetic construct
  misc_feature 1..219: note = promoter
  source 1..219: mol_type = other DNA
gagggcctatttcccatggttccttcatatttgcatagaggatgcaagactgtcagagggacgattgcaattaacttggccataaacacaaacctattggcacaaactatgtgatatagaaagttatgattgttcaagaagtttgtaatttaaaaaaaggaccaaccgtaactgaaaagtctttcgttttctcaactttatatatcttccggaaaggac

SEQ ID NO: 7542 - DNA, 219 bp, synthetic construct
  misc_feature 1..219: note = promoter
  source 1..219: mol_type = other DNA
gagggcctatttcccatggttccttcatatttgcatagaggatgcaagactgtcagagggacgattgcaattaacttggccataaacacaaacctattggcacaaactatgtgatatagaaagttatgattgttcaagaagtttgtaatttaaaaaaaggaccacccgtaactgaaaagtctttcgttttctcaactttatatatcttccggaaaggac

SEQ ID NO: 7543 - DNA, 219 bp, synthetic construct
  misc_feature 1..219: note = promoter
  source 1..219: mol_type = other DNA
gagggcctatttcccatggttccttcatatttgcatagaggatgcaagactgtcagagggacgattgcaattaacttggccataaacacaaacctattggcacaaactatgtgatatagaaagttatgattgttcaagaagtttgtaatttaaaaaaaggaccactcgtaactgaaaagtctttcgttttctcaactttatatatcttccggaaaggac

SEQ ID NO: 7544 - DNA, 219 bp, synthetic construct
  misc_feature 1..219: note = promoter
  source 1..219: mol_type = other DNA
gagggcctatttcccatggttccttcatatttgcatagaggatgcaagactgtcagagggacgattgcaattaacttggccataaacacaaacctattggcacaaactatgtgatatagaaagttatgattgttcaagaagtttgtaatttaaaaaaaggaccactagtaactgaaaagtctttcgttttctcaactttatatatcttccggaaaggac

SEQ ID NO: 7545 - DNA, 219 bp, synthetic construct
  misc_feature 1..219: note = promoter
  source 1..219: mol_type = other DNA
gagggcctatttcccatggttccttcatatttgcatagaggatgcaagactgtcagagggacgattgcaattaacttggccataaacacaaacctattggcacaaactatgtgatatagaaagttatgattgttcaagaagtttgtaatttaaaaaaaggaccactattaactgaaaagtctttcgttttctcaactttatatatcttccggaaaggac

SEQ ID NO: 7546 - DNA, 219 bp, synthetic construct
  misc_feature 1..219: note = promoter
  source 1..219: mol_type = other DNA
gagggcctatttcccatggttccttcatatttgcatagaggatgcaagactgtcagagggacgattgcaattaacttggccataaacacaaacctattggcacaaactatgtgatatagaaagttatgattgttcaagaagtttgtaatttaaaaaaaggaccactatgaactgaaaagtctttcgttttctcaactttatatatcttccggaaaggac

SEQ ID NO: 7547 - DNA, 219 bp, synthetic construct
  misc_feature 1..219: note = promoter
  source 1..219: mol_type = other DNA
gagggcctatttcccatggttccttcatatttgcatagaggatgcaagactgtcagagggacgattgcaattaacttggccataaacacaaacctattggcacaaactatgtgatatagaaagttatgattgttcaagaagtttgtaatttaaaaaaaggaccactatgtactgaaaagtctttcgttttctcaactttatatatcttccggaaaggac

SEQ ID NO: 7548 - DNA, 219 bp, synthetic construct; identical to SEQ ID NO: 7547
  misc_feature 1..219: note = promoter
  source 1..219: mol_type = other DNA

SEQ ID NO: 7549 - DNA, 219 bp, synthetic construct; identical to SEQ ID NO: 7547
  misc_feature 1..219: note = promoter
  source 1..219: mol_type = other DNA

SEQ ID NO: 7550 - DNA, 219 bp, synthetic construct; identical to SEQ ID NO: 7547
  misc_feature 1..219: note = promoter
  source 1..219: mol_type = other DNA

SEQ ID NO: 7551 - DNA, 219 bp, synthetic construct
  misc_feature 1..219: note = promoter
  source 1..219: mol_type = other DNA
gagggcctatttcccatggttccttcatatttgcatagaggatgcaagactgtcagagggacgattgcaattaacttggccataaacacaaacctattggcacaaactatgtgatatagaaagttatgattgttcaagaagtttgtaatttaaaaaaaggaccactatgtacttaaaagtctttcgttttctcaactttatatatcttccggaaaggac

SEQ ID NO: 7552 - DNA, 219 bp, synthetic construct; identical to SEQ ID NO: 7551
  misc_feature 1..219: note = promoter
  source 1..219: mol_type = other DNA

SEQ ID NO: 7553 - DNA, 219 bp, synthetic construct
  misc_feature 1..219: note = promoter
  source 1..219: mol_type = other DNA
gagggcctatttcccatggttccttcatatttgcatagaggatgcaagactgtcagagggacgattgcaattaacttggccataaacacaaacctattggcacaaactatgtgatatagaaagttatgattgttcaagaagtttgtaatttaaaaaaaggaccactatgtacttacaagtctttcgttttctcaactttatatatcttccggaaaggac

SEQ ID NO: 7554 - DNA, 219 bp, synthetic construct
  misc_feature 1..219: note = promoter
  source 1..219: mol_type = other DNA
gagggcctatttcccatggttccttcatatttgcatagaggatgcaagactgtcagagggacgattgcaattaacttggccataaacacaaacctattggcacaaactatgtgatatagaaagttatgattgttcaagaagtttgtaatttaaaaaaaggaccactatgtacttaccagtctttcgttttctcaactttatatatcttccggaaaggac

SEQ ID NO: 7555 - DNA, 219 bp, synthetic construct
  misc_feature 1..219: note = promoter
  source 1..219: mol_type = other DNA
gagggcctatttcccatggttccttcatatttgcatagaggatgcaagactgtcagagggacgattgcaattaacttggccataaacacaaacctattggcacaaactatgtgatatagaaagttatgattgttcaagaagtttgtaatttaaaaaaaggaccactatgtacttaccggtctttcgttttctcaactttatatatcttccggaaaggac

SEQ ID NO: 7556 - DNA, 219 bp, synthetic construct
  misc_feature 1..219: note = promoter
  source 1..219: mol_type = other DNA
gagggcctatttcccatggttccttcatatttgcatagaggatgcaagactgtcagagggacgattgcaattaacttggccataaacacaaacctattggcacaaactatgtgatatagaaagttatgattgttcaagaagtttgtaatttaaaaaaaggaccactatgtacttaccgttctttcgttttctcaactttatatatcttccggaaaggac

SEQ ID NO: 7557 - DNA, 219 bp, synthetic construct
  misc_feature 1..219: note = promoter
  source 1..219: mol_type = other DNA
gagggcctatttcccatggttccttcatatttgcatagaggatgcaagactgtcagagggacgattgcaattaacttggccataaacacaaacctattggcacaaactatgtgatatagaaagttatgattgttcaagaagtttgtaatttaaaaaaaggaccactatgtacttaccgtactttcgttttctcaactttatatatcttccggaaaggac

SEQ ID NO: 7558 - DNA, 219 bp, synthetic construct
  misc_feature 1..219: note = promoter
  source 1..219: mol_type = other DNA
gagggcctatttcccatggttccttcatatttgcatagaggatgcaagactgtcagagggacgattgcaattaacttggccataaacacaaacctattggcacaaactatgtgatatagaaagttatgattgttcaagaagtttgtaatttaaaaaaaggaccactatgtacttaccgtaatttcgttttctcaactttatatatcttccggaaaggac

SEQ ID NO: 7559 - DNA, 219 bp, synthetic construct
  misc_feature 1..219: note = promoter
  source 1..219: mol_type = other DNA
gagggcctatttcccatggttccttcatatttgcatagaggatgcaagactgtcagagggacgattgcaattaacttggccataaacacaaacctattggcacaaactatgtgatatagaaagttatgattgttcaagaagtttgtaatttaaaaaaaggaccactatgtacttaccgtaacttcgttttctcaactttatatatcttccggaaaggac

SEQ ID NO: 7560 - DNA, 219 bp, synthetic construct; identical to SEQ ID NO: 7559
  misc_feature 1..219: note = promoter
  source 1..219: mol_type = other DNA

SEQ ID NO: 7561 - DNA, 219 bp, synthetic construct
  misc_feature 1..219: note = promoter
  source 1..219: mol_type = other DNA
gagggcctatttcccatggttccttcatatttgcatagaggatgcaagactgtcagagggacgattgcaattaacttggccataaacacaaacctattggcacaaactatgtgatatagaaagttatgattgttcaagaagtttgtaatttaaaaaaaggaccactatgtacttaccgtaactgcgttttctcaactttatatatcttccggaaaggac

SEQ ID NO: 7562 - DNA, 219 bp, synthetic construct
  misc_feature 1..219: note = promoter
  source 1..219: mol_type = other DNA
gagggcctatttcccatggttccttcatatttgcatagaggatgcaagactgtcagagggacgattgcaattaacttggccataaacacaaacctattggcacaaactatgtgatatagaaagttatgattgttcaagaagtttgtaatttaaaaaaaggaccactatgtacttaccgtaactgagttttctcaactttatatatcttccggaaaggac

SEQ ID NO: 7563 - DNA, 219 bp, synthetic construct
  misc_feature 1..219: note = promoter
  source 1..219: mol_type = other DNA
gagggcctatttcccatggttccttcatatttgcatagaggatgcaagactgtcagagggacgattgcaattaacttggccataaacacaaacctattggcacaaactatgtgatatagaaagttatgattgttcaagaagtttgtaatttaaaaaaaggaccactatgtacttaccgtaactgaattttctcaactttatatatcttccggaaaggac

SEQ ID NO: 7564 - DNA, 219 bp, synthetic construct
  misc_feature 1..219: note = promoter
  source 1..219: mol_type = other DNA
gagggcctatttcccatggttccttcatatttgcatagaggatgcaagactgtcagagggacgattgcaattaacttggccataaacacaaacctattggcacaaactatgtgatatagaaagttatgattgttcaagaagtttgtaatttaaaaaaaggaccactatgtacttaccgtaactgaaatttctcaactttatatatcttccggaaaggac

SEQ ID NO: 7565 - DNA, 219 bp, synthetic construct
  misc_feature 1..219: note = promoter
  source 1..219: mol_type = other DNA
gagggcctatttcccatggttccttcatatttgcatagaggatgcaagactgtcagagggacgattgcaattaacttggccataaacacaaacctattggcacaaactatgtgatatagaaagttatgattgttcaagaagtttgtaatttaaaaaaaggaccactatgtacttaccgtaactgaaaattctcaactttatatatcttccggaaaggac

SEQ ID NO: 7566 - DNA, 219 bp, synthetic construct
  misc_feature 1..219: note = promoter
  source 1..219: mol_type = other DNA
gagggcctatttcccatggttccttcatatttgcatagaggatgcaagactgtcagagggacgattgcaattaacttggccataaacacaaacctattggcacaaactatgtgatatagaaagttatgattgttcaagaagtttgtaatttaaaaaaaggaccactatgtacttaccgtaactgaaaagtctcaactttatatatcttccggaaaggac

SEQ ID NO: 7567 - DNA, 219 bp, synthetic construct; identical to SEQ ID NO: 7566
  misc_feature 1..219: note = promoter
  source 1..219: mol_type = other DNA

SEQ ID NO: 7568 - DNA, 219 bp, synthetic construct; identical to SEQ ID NO: 7566
  misc_feature 1..219: note = promoter
  source 1..219: mol_type = other DNA

SEQ ID NO: 7569 - DNA, 219 bp, synthetic construct; identical to SEQ ID NO: 7566
  misc_feature 1..219: note = promoter
  source 1..219: mol_type = other DNA

SEQ ID NO: 7570 - DNA, 219 bp, synthetic construct
  misc_feature 1..219: note = promoter
  source 1..219: mol_type = other DNA
gagggcctatttcccatggttccttcatatttgcatagaggatgcaagactgtcagagggacgattgcaattaacttggccataaacacaaacctattggcacaaactatgtgatatagaaagttatgattgttcaagaagtttgtaatttaaaaaaaggaccactatgtacttaccgtaactgaaaagtcttaactttatatatcttccggaaaggac

SEQ ID NO: 7571 - DNA, 219 bp, synthetic construct
  misc_feature 1..219: note = promoter
  source 1..219: mol_type = other DNA
gagggcctatttcccatggttccttcatatttgcatagaggatgcaagactgtcagagggacgattgcaattaacttggccataaacacaaacctattggcacaaactatgtgatatagaaagttatgattgttcaagaagtttgtaatttaaaaaaaggaccactatgtacttaccgtaactgaaaagtctttactttatatatcttccggaaaggac

SEQ ID NO: 7572 - DNA, 219 bp, synthetic construct
  misc_feature 1..219: note = promoter
  source 1..219: mol_type = other DNA
gagggcctatttcccatggttccttcatatttgcatagaggatgcaagactgtcagagggacgattgcaattaacttggccataaacacaaacctattggcacaaactatgtgatatagaaagttatgattgttcaagaagtttgtaatttaaaaaaaggaccactatgtacttaccgtaactgaaaagtctttcctttatatatcttccggaaaggac

SEQ ID NO: 7573 - DNA, 219 bp, synthetic construct
  misc_feature 1..219: note = promoter
  source 1..219: mol_type = other DNA
gagggcctatttcccatggttccttcatatttgcatagaggatgcaagactgtcagagggacgattgcaattaacttggccataaacacaaacctattggcacaaactatgtgatatagaaagttatgattgttcaagaagtttgtaatttaaaaaaaggaccactatgtacttaccgtaactgaaaagtctttcgtttatatatcttccggaaaggac

SEQ ID NO: 7574 - DNA, 219 bp, synthetic construct; identical to SEQ ID NO: 7573
  misc_feature 1..219: note = promoter
  source 1..219: mol_type = other DNA

SEQ ID NO: 7575 - DNA, 219 bp, synthetic construct; identical to SEQ ID NO: 7573
  misc_feature 1..219: note = promoter
  source 1..219: mol_type = other DNA

SEQ ID NO: 7576 - DNA, 219 bp, synthetic construct; identical to SEQ ID NO: 7573
  misc_feature 1..219: note = promoter
  source 1..219: mol_type = other DNA

SEQ ID NO: 7577 - DNA, 219 bp, synthetic construct
  misc_feature 1..219: note = promoter
  source 1..219: mol_type = other DNA
gagggcctatttcccatggttccttcatatttgcatagaggatgcaagactgtcagagggacgattgcaattaacttggccataaacacaaacctattggcacaaactatgtgatatagaaagttatgattgttcaagaagtttgtaatttaaaaaaaggaccactatgtacttaccgtaactgaaaagtctttcgtttttatatcttccggaaaggac

SEQ ID NO: 7578 - DNA, 219 bp, synthetic construct
  misc_feature 1..219: note = promoter
  source 1..219: mol_type = other DNA
gagggcctatttcccatggttccttcatatttgcatagaggatgcaagactgtcagagggacgattgcaattaacttggccataaacacaaacctattggcacaaactatgtgatatagaaagttatgattgttcaagaagtttgtaatttaaaaaaaggaccactatgtacttaccgtaactgaaaagtctttcgttttcatatcttccggaaaggac

SEQ ID NO: 7579 - DNA, 219 bp, synthetic construct
  misc_feature 1..219: note = promoter
  source 1..219: mol_type = other DNA
gagggcctatttcccatggttccttcatatttgcatagaggatgcaagactgtcagagggacgattgcaattaacttggccataaacacaaacctattggcacaaactatgtgatatagaaagttatgattgttcaagaagtttgtaatttaaaaaaaggaccactatgtacttaccgtaactgaaaagtctttcgttttcttatcttccggaaaggac

SEQ ID NO: 7580 - DNA, 219 bp, synthetic construct
  misc_feature 1..219: note = promoter
  source 1..219: mol_type = other DNA
gagggcctatttcccatggttccttcatatttgcatagaggatgcaagactgtcagagggacgattgcaattaacttggccataaacacaaacctattggcacaaactatgtgatatagaaagttatgattgttcaagaagtttgtaatttaaaaaaaggaccactatgtacttaccgtaactgaaaagtctttcgttttctcatcttccggaaaggac

SEQ ID NO: 7581 - DNA, 219 bp, synthetic construct; identical to SEQ ID NO: 7580
  misc_feature 1..219: note = promoter
  source 1..219: mol_type = other DNA

SEQ ID NO: 7582 - DNA, 219 bp, synthetic construct
  misc_feature 1..219: note = promoter
  source 1..219: mol_type = other DNA
gagggcctatttcccatggttccttcatatttgcatagaggatgcaagactgtcagagggacgattgcaattaacttggccataaacacaaacctattggcacaaactatgtgatatagaaagttatgattgttcaagaagtttgtaatttaaaaaaaggaccactatgtacttaccgtaactgaaaagtctttcgttttctcaacttccggaaaggac

SEQ ID NO: 7583 - DNA, 219 bp, synthetic construct; identical to SEQ ID NO: 7582
  misc_feature 1..219: note = promoter
  source 1..219: mol_type = other DNA

SEQ ID NO: 7584 - DNA, 219 bp, synthetic construct; identical to SEQ ID NO: 7582
  misc_feature 1..219: note = promoter
  source 1..219: mol_type = other DNA

SEQ ID NO: 7585 - DNA, 219 bp, synthetic construct; identical to SEQ ID NO: 7582
  misc_feature 1..219: note = promoter
  source 1..219: mol_type = other DNA

SEQ ID NO: 7586 - DNA, 219 bp, synthetic construct
  misc_feature 1..219: note = promoter
  source 1..219: mol_type = other DNA
gagggcctatttcccatggttccttcatatttgcatagaggatgcaagactgtcagagggacgattgcaattaacttggccataaacacaaacctattggcacaaactatgtgatatagaaagttatgattgttcaagaagtttgtaatttaaaaaaaggaccactatgtacttaccgtaactgaaaagtctttcgttttctcaactttcggaaaggac

SEQ ID NO: 7587 - DNA, 219 bp, synthetic construct
  misc_feature 1..219: note = promoter
  source 1..219: mol_type = other DNA
gagggcctatttcccatggttccttcatatttgcatagaggatgcaagactgtcagagggacgattgcaattaacttggccataaacacaaacctattggcacaaactatgtgatatagaaagttatgattgttcaagaagtttgtaatttaaaaaaaggaccactatgtacttaccgtaactgaaaagtctttcgttttctcaactttaggaaaggac

SEQ ID NO: 7588 - DNA, 219 bp, synthetic construct
  misc_feature 1..219: note = promoter
  source 1..219: mol_type = other DNA
gagggcctatttcccatggttccttcatatttgcatagaggatgcaagactgtcagagggacgattgcaattaacttggccataaacacaaacctattggcacaaactatgtgatatagaaagttatgattgttcaagaagtttgtaatttaaaaaaaggaccactatgtacttaccgtaactgaaaagtctttcgttttctcaactttatgaaaggac

SEQ ID NO: 7589 - DNA, 219 bp, synthetic construct
  misc_feature 1..219: note = promoter
  source 1..219: mol_type = other DNA
gagggcctatttcccatggttccttcatatttgcatagaggatgcaagactgtcagagggacgattgcaattaacttggccataaacacaaacctattggcacaaactatgtgatatagaaagttatgattgttcaagaagtttgtaatttaaaaaaaggaccactatgtacttaccgtaactgaaaagtctttcgttttctcaactttataaaaggac

SEQ ID NO: 7590 - DNA, 219 bp, synthetic construct
  misc_feature 1..219: note = promoter
  source 1..219: mol_type = other DNA
gagggcctatttcccatggttccttcatatttgcatagaggatgcaagactgtcagagggacgattgcaattaacttggccataaacacaaacctattggcacaaactatgtgatatagaaagttatgattgttcaagaagtttgtaatttaaaaaaaggaccactatgtacttaccgtaactgaaaagtctttcgttttctcaactttatataaggac

SEQ ID NO: 7591 - DNA, 219 bp, synthetic construct; identical to SEQ ID NO: 7590
  misc_feature 1..219: note = promoter
  source 1..219: mol_type = other DNA

SEQ ID NO: 7592 - DNA, 219 bp, synthetic construct
  misc_feature 1..219: note = promoter
  source 1..219: mol_type = other DNA
gagggcctatttcccatggttccttcatatttgcatagaggatgcaagactgtcagagggacgattgcaattaacttggccataaacacaaacctattggcacaaactatgtgatatagaaagttatgattgttcaagaagtttgtaatttaaaaaaaggaccactatgtacttaccgtaactgaaaagtctttcgttttctcaactttatatatggac

SEQ ID NO: 7593 - DNA, 219 bp, synthetic construct
  misc_feature 1..219: note = promoter
  source 1..219: mol_type = other DNA
gagggcctatttcccatggttccttcatatttgcatagaggatgcaagactgtcagagggacgattgcaattaacttggccataaacacaaacctattggcacaaactatgtgatatagaaagttatgattgttcaagaagtttgtaatttaaaaaaaggaccactatgtacttaccgtaactgaaaagtctttcgttttctcaactttatatatcgac

SEQ ID NO: 7594 - DNA, 219 bp, synthetic construct
  misc_feature 1..219: note = promoter
  source 1..219: mol_type = other DNA
gagggcctatttcccatggttccttcatatttgcatagaggatgcaagactgtcagagggacgattgcaattaacttggccataaacacaaacctattggcacaaactatgtgatatagaaagttatgattgttcaagaagtttgtaatttaaaaaaaggaccactatgtacttaccgtaactgaaaagtctttcgttttctcaactttatatatctac

SEQ ID NO: 7595 - DNA, 219 bp, synthetic construct
  misc_feature 1..219: note = promoter
  source 1..219: mol_type = other DNA
gagggcctatttcccatggttccttcatatttgcatagaggatgcaagactgtcagagggacgattgcaattaacttggccataaacacaaacctattggcacaaactatgtgatatagaaagttatgattgttcaagaagtttgtaatttaaaaaaaggaccactatgtacttaccgtaactgaaaagtctttcgttttctcaactttatatatcttc

SEQ ID NO: 7596 - DNA, 219 bp, synthetic construct; identical to SEQ ID NO: 7595
  misc_feature 1..219: note = promoter
  source 1..219: mol_type = other DNA

SEQ ID NO: 7597 - DNA, 220 bp, synthetic construct
  misc_feature 1..220: note = promoter
  source 1..220: mol_type = other DNA
gagggcctatttcccatggttccttcatatttgcatagaggatgcaagactgtcagagggacgattgcaattaacttggccataaacacaaacctattggcacaaactatgtgatatagaaagttatgattgttcaagaagtttgtaatttaaaaaaaggaccactatgtacttaccgtaactgaaaagtctttcgttttctcaactttatatatcttcc

SEQ ID NO: 7598 - DNA, 221 bp, synthetic construct
  misc_feature 1..221: note = promoter
  source 1..221: mol_type = other DNA
gagggcctatttcccatggttccttcatatttgcatagaggatgcaagactgtcagagggacgattgcaattaacttggccataaacacaaacctattggcacaaactatgtgatatagaaagttatgattgttcaagaagtttgtaatttaaaaaaaggaccactatgtacttaccgtaactgaaaagtctttcgttttctcaactttatatatcttccg

SEQ ID NO: 7599 - DNA, 222 bp, synthetic construct
  misc_feature 1..222: note = promoter
  source 1..222: mol_type = other DNA
gagggcctatttcccatggttccttcatatttgcatagaggatgcaagactgtcagagggacgattgcaattaacttggccataaacacaaacctattggcacaaactatgtgatatagaaagttatgattgttcaagaagtttgtaatttaaaaaaaggaccactatgtacttaccgtaactgaaaagtctttcgttttctcaactttatatatcttccgg

SEQ ID NO: 7600 - DNA, 223 bp, synthetic construct
  misc_feature 1..223: note = promoter
  source 1..223: mol_type = other DNA
gagggcctatttcccatggttccttcatatttgcatagaggatgcaagactgtcagagggacgattgcaattaacttggccataaacacaaacctattggcacaaactatgtgatatagaaagttatgattgttcaagaagtttgtaatttaaaaaaaggaccactatgtacttaccgtaactgaaaagtctttcgttttctcaactttatatatcttccgga

SEQ ID NO: 7601 - DNA, 224 bp, synthetic construct; identical to SEQ ID NO: 7372
  misc_feature 1..224: note = promoter
  source 1..224: mol_type = other DNA

SEQ ID NO: 7602 - DNA, 225 bp, synthetic construct; identical to SEQ ID NO: 7373
  misc_feature 1..225: note = promoter
  source 1..225: mol_type = other DNA

SEQ ID NO: 7603 - DNA, 226 bp, synthetic construct; identical to SEQ ID NO: 7374
  misc_feature 1..226: note = promoter
  source 1..226: mol_type = other DNA

SEQ ID NO: 7604 - DNA, 227 bp, synthetic construct; identical to SEQ ID NO: 7146
  misc_feature 1..227: note = promoter
  source 1..227: mol_type = other DNA

SEQ ID NO: 7605 - DNA, 228 bp, synthetic construct; identical to SEQ ID NO: 6918
  misc_feature 1..228: note = promoter
  source 1..228: mol_type = other DNA

SEQ ID NO: 7606 - DNA, 240 bp, synthetic construct; identical to SEQ ID NO: 3607
  misc_feature 1..240: note = promoter
  source 1..240: mol_type = other DNA

SEQ ID NO: 7607 - DNA, 238 bp, synthetic construct
  misc_feature 1..238: note = promoter
  source 1..238: mol_type = other DNA
gggcctatttcccatgagtccttcatatttgcatatacgatgcaagaatgttagagagataattagaattaatttgattataaacataaagatattagtacaaaatattgatgcagaaagtaataatttattgggtagtttgtaattttaaaattatgttttaaaatggaccatgacatacttgccgtaagtgtaaagtatttctatttcttgcctttatatatcttctggcaaggac

SEQ ID NO: 7608 - DNA, 238 bp, synthetic construct; identical to SEQ ID NO: 7607
  misc_feature 1..238: note = promoter
  source 1..238: mol_type = other DNA

SEQ ID NO: 7609 - DNA, 238 bp, synthetic construct
  misc_feature 1..238: note = promoter
  source 1..238: mol_type = other DNA
gagcctatttcccatgagtccttcatatttgcatatacgatgcaagaatgttagagagataattagaattaatttgattataaacataaagatattagtacaaaatattgatgcagaaagtaataatttattgggtagtttgtaattttaaaattatgttttaaaatggaccatgacatacttgccgtaagtgtaaagtatttctatttcttgcctttatatatcttctggcaaggac

SEQ ID NO: 7610 - DNA, 238 bp, synthetic construct; identical to SEQ ID NO: 7609
  misc_feature 1..238: note = promoter
  source 1..238: mol_type = other DNA

SEQ ID NO: 7611 - DNA, 238 bp, synthetic construct
  misc_feature 1..238: note = promoter
  source 1..238: mol_type = other DNA
gaggctatttcccatgagtccttcatatttgcatatacgatgcaagaatgttagagagataattagaattaatttgattataaacataaagatattagtacaaaatattgatgcagaaagtaataatttattgggtagtttgtaattttaaaattatgttttaaaatggaccatgacatacttgccgtaagtgtaaagtatttctatttcttgcctttatatatcttctggcaaggac

SEQ ID NO: 7612 - DNA, 238 bp, synthetic construct
  misc_feature 1..238: note = promoter
  source 1..238: mol_type = other DNA
gagggtatttcccatgagtccttcatatttgcatatacgatgcaagaatgttagagagataattagaattaatttgattataaacataaagatattagtacaaaatattgatgcagaaagtaataatttattgggtagtttgtaattttaaaattatgttttaaaatggaccatgacatacttgccgtaagtgtaaagtatttctatttcttgcctttatatatcttctggcaaggac

SEQ ID NO: 7613 - DNA, 238 bp, synthetic construct
  misc_feature 1..238: note = promoter
  source 1..238: mol_type = other DNA
gagggcatttcccatgagtccttcatatttgcatatacgatgcaagaatgttagagagataattagaattaatttgattataaacataaagatattagtacaaaatattgatgcagaaagtaataatttattgggtagtttgtaattttaaaattatgttttaaaatggaccatgacatacttgccgtaagtgtaaagtatttctatttcttgcctttatatatcttctggcaaggac

SEQ ID NO: 7614 - DNA, 238 bp, synthetic construct
  misc_feature 1..238: note = promoter
  source 1..238: mol_type = other DNA
gagggcctttcccatgagtccttcatatttgcatatacgatgcaagaatgttagagagataattagaattaatttgattataaacataaagatattagtacaaaatattgatgcagaaagtaataatttattgggtagtttgtaattttaaaattatgttttaaaatggaccatgacatacttgccgtaagtgtaaagtatttctatttcttgcctttatatatcttctggcaaggac

SEQ ID NO: 7615 - DNA, 238 bp, synthetic construct; identical to SEQ ID NO: 7614
  misc_feature 1..238: note = promoter
  source 1..238: mol_type = other DNA

SEQ ID NO: 7616 - DNA, 238 bp, synthetic construct
  misc_feature 1..238: note = promoter
  source 1..238: mol_type = other DNA
gagggcctatcccatgagtccttcatatttgcatatacgatgcaagaatgttagagagataattagaattaatttgattataaacataaagatattagtacaaaatattgatgcagaaagtaataatttattgggtagtttgtaattttaaaattatgttttaaaatggaccatgacatacttgccgtaagtgtaaagtatttctatttcttgcctttatatatcttctggcaaggac

SEQ ID NO: 7617 - DNA, 238 bp, synthetic construct; identical to SEQ ID NO: 7616
  misc_feature 1..238: note = promoter
  source 1..238: mol_type = other DNA

SEQ ID NO: 7618 - DNA, 238 bp, synthetic construct
  misc_feature 1..238: note = promoter
  source 1..238: mol_type = other DNA
gagggcctattccatgagtccttcatatttgcatatacgatgcaagaatgttagagagataattagaattaatttgattataaacataaagatattagtacaaaatattgatgcagaaagtaataatttattgggtagtttgtaattttaaaattatgttttaaaatggaccatgacatacttgccgtaagtgtaaagtatttctatttcttgcctttatatatcttctggcaaggac

SEQ ID NO: 7619 - DNA, 238 bp, synthetic construct
  misc_feature 1..238: note = promoter
  source 1..238: mol_type = other DNA
gagggcctatttcatgagtccttcatatttgcatatacgatgcaagaatgttagagagataattagaattaatttgattataaacataaagatattagtacaaaatattgatgcagaaagtaataatttattgggtagtttgtaattttaaaattatgttttaaaatggaccatgacatacttgccgtaagtgtaaagtatttctatttcttgcctttatatatcttctggcaaggac

SEQ ID NO: 7620 - DNA, 238 bp, synthetic construct; identical to SEQ ID NO: 7619
  misc_feature 1..238: note = promoter
  source 1..238: mol_type = other DNA

SEQ ID NO: 7621 - DNA, 238 bp, synthetic construct
  misc_feature 1..238: note = promoter
  source 1..238: mol_type = other DNA
gagggcctatttcctgagtccttcatatttgcatatacgatgcaagaatgttagagagataattagaattaatttgattataaacataaagatattagtacaaaatattgatgcagaaagtaataatttattgggtagtttgtaattttaaaattatgttttaaaatggaccatgacatacttgccgtaagtgtaaagtatttctatttcttgcctttatatatcttctggcaaggac

SEQ ID NO: 7622 - DNA, 238 bp, synthetic construct
  misc_feature 1..238: note = promoter
  source 1..238: mol_type = other DNA
gagggcctatttcccgagtccttcatatttgcatatacgatgcaagaatgttagagagataattagaattaatttgattataaacataaagatattagtacaaaatattgatgcagaaagtaataatttattgggtagtttgtaattttaaaattatgttttaaaatggaccatgacatacttgccgtaagtgtaaagtatttctatttcttgcctttatatatcttctggcaaggac

SEQ ID NO: 7623 - DNA, 238 bp, synthetic construct
  misc_feature 1..238: note = promoter
  source 1..238: mol_type = other DNA
gagggcctatttcccaagtccttcatatttgcatatacgatgcaagaatgttagagagataattagaattaatttgattataaacataaagatattagtacaaaatattgatgcagaaagtaataatttattgggtagtttgtaattttaaaattatgttttaaaatggaccatgacatacttgccgtaagtgtaaagtatttctatttcttgcctttatatatcttctggcaaggac

SEQ ID NO: 7624 - DNA, 238 bp, synthetic construct
  misc_feature 1..238: note = promoter
  source 1..238: mol_type = other DNA
gagggcctatttcccatgtccttcatatttgcatatacgatgcaagaatgttagagagataattagaattaatttgattataaacataaagatattagtacaaaatattgatgcagaaagtaataatttattgggtagtttgtaattttaaaattatgttttaaaatggaccatgacatacttgccgtaagtgtaaagtatttctatttcttgcctttatatatcttctggcaaggac

SEQ ID NO: 7625 - DNA, 238 bp, synthetic construct; identical to SEQ ID NO: 7624
  misc_feature 1..238: note = promoter
  source 1..238: mol_type = other DNA

SEQ ID NO: 7626 - DNA, 238 bp, synthetic construct
  misc_feature 1..238: note = promoter
  source 1..238: mol_type = other DNA
gagggcctatttcccatgaccttcatatttgcatatacgatgcaagaatgttagagagataattagaattaatttgattataaacataaagatattagtacaaaatattgatgcagaaagtaataatttattgggtagtttgtaattttaaaattatgttttaaaatggaccatgacatacttgccgtaagtgtaaagtatttctatttcttgcctttatatatcttctggcaaggac

SEQ ID NO: 7627 - DNA, 238 bp, synthetic construct
  misc_feature 1..238: note = promoter
  source 1..238: mol_type = other DNA
gagggcctatttcccatgagcttcatatttgcatatacgatgcaagaatgttagagagataattagaattaatttgattataaacataaagatattagtacaaaatattgatgcagaaagtaataatttattgggtagtttgtaattttaaaattatgttttaaaatggaccatgacatacttgccgtaagtgtaaagtatttctatttcttgcctttatatatcttctggcaaggac

SEQ ID NO: 7628 - DNA, 238 bp, synthetic construct
  misc_feature 1..238: note = promoter
  source 1..238: mol_type = other DNA
gagggcctatttcccatgagtttcatatttgcatatacgatgcaagaatgttagagagataattagaattaatttgattataaacataaagatattagtacaaaatattgatgcagaaagtaataatttattgggtagtttgtaattttaaaattatgttttaaaatggaccatgacatacttgccgtaagtgtaaagtatttctatttcttgcctttatatatcttctggcaaggac

SEQ ID NO: 7629 - DNA, 238 bp, synthetic construct
  misc_feature 1..238: note = promoter
  source 1..238: mol_type = other DNA
gagggcctatttcccatgagtctcatatttgcatatacgatgcaagaatgttagagagataattagaattaatttgattataaacataaagatattagtacaaaatattgatgcagaaagtaataatttattgggtagtttgtaattttaaaattatgttttaaaatggaccatgacatacttgccgtaagtgtaaagtatttctatttcttgcctttatatatcttctggcaaggac

SEQ ID NO: 7630 - DNA, 238 bp, synthetic construct
  misc_feature 1..238: note = promoter
  source 1..238: mol_type = other DNA
gagggcctatttcccatgagtcccatatttgcatatacgatgcaagaatgttagagagataattagaattaatttgattataaacataaagatattagtacaaaatattgatgcagaaagtaataatttattgggtagtttgtaattttaaaattatgttttaaaatggaccatgacatacttgccgtaagtgtaaagtatttctatttcttgcctttatatatcttctggcaaggac

SEQ ID NO: 7631 - DNA, 238 bp, synthetic construct
  misc_feature 1..238: note = promoter
  source 1..238: mol_type = other DNA
gagggcctatttcccatgagtcctatatttgcatatacgatgcaagaatgttagagagataattagaattaatttgattataaacataaagatattagtacaaaatattgatgcagaaagtaataatttattgggtagtttgtaattttaaaattatgttttaaaatggaccatgacatacttgccgtaagtgtaaagtatttctatttcttgcctttatatatcttctggcaaggac

SEQ ID NO: 7632 - DNA, 238 bp, synthetic construct
  misc_feature 1..238: note = promoter
  source 1..238: mol_type = other DNA
gagggcctatttcccatgagtcctttatttgcatatacgatgcaagaatgttagagagataattagaattaatttgattataaacataaagatattagtacaaaatattgatgcagaaagtaataatttattgggtagtttgtaattttaaaattatgttttaaaatggaccatgacatacttgccgtaagtgtaaagtatttctatttcttgcctttatatatcttctggcaaggac

SEQ ID NO: 7633 - DNA, 238 bp, synthetic construct
  misc_feature 1..238: note = promoter
  source 1..238: mol_type = other DNA
gagggcctatttcccatgagtccttcatttgcatatacgatgcaagaatgttagagagataattagaattaatttgattataaacataaagatattagtacaaaatattgatgcagaaagtaataatttattgggtagtttgtaattttaaaattatgttttaaaatggaccatgacatacttgccgtaagtgtaaagtatttctatttcttgcctttatatatcttctggcaaggac

SEQ ID NO: 7634 - DNA, 238 bp, synthetic construct; identical to SEQ ID NO: 7633
  misc_feature 1..238: note = promoter
  source 1..238: mol_type = other DNA

SEQ ID NO: 7635 - DNA, 238 bp, synthetic construct; identical to SEQ ID NO: 7633
  misc_feature 1..238: note = promoter
  source 1..238: mol_type = other DNA

SEQ ID NO: 7636 - DNA, 238 bp, synthetic construct
  misc_feature 1..238: note = promoter
  source 1..238: mol_type = other DNA
gagggcctatttcccatgagtccttcatatgcatatacgatgcaagaatgttagagagataattagaattaatttgattataaacataaagatattagtacaaaatattgatgcagaaagtaataatttattgggtagtttgtaattttaaaattatgttttaaaatggaccatgacatacttgccgtaagtgtaaagtatttctatttcttgcctttatatatcttctggcaaggac

SEQ ID NO: 7637 - DNA, 238 bp, synthetic construct; identical to SEQ ID NO: 7636
  misc_feature 1..238: note = promoter
  source 1..238: mol_type = other DNA

SEQ ID NO: 7638 - DNA, 238 bp, synthetic construct
  misc_feature 1..238: note = promoter
  source 1..238: mol_type = other DNA
gagggcctatttcccatgagtccttcatattcatatacgatgcaagaatgttagagagataattagaattaatttgattataaacataaagatattagtacaaaatattgatgcagaaagtaataatttattgggtagtttgtaattttaaaattatgttttaaaatggaccatgacatacttgccgtaagtgtaaagtatttctatttcttgcctttatatatcttctggcaaggac

SEQ ID NO: 7639 - DNA, 238 bp, synthetic construct
  misc_feature 1..238: note = promoter
  source 1..238: mol_type = other DNA
gagggcctatttcccatgagtccttcatatttatatacgatgcaagaatgttagagagataattagaattaatttgattataaacataaagatattagtacaaaatattgatgcagaaagtaataatttattgggtagtttgtaattttaaaattatgttttaaaatggaccatgacatacttgccgtaagtgtaaagtatttctatttcttgcctttatatatcttctggcaaggac

SEQ ID NO: 7640 - DNA, 238 bp, synthetic construct
  misc_feature 1..238: note = promoter
  source 1..238: mol_type = other DNA
gagggcctatttcccatgagtccttcatatttgtatacgatgcaagaatgttagagagataattagaattaatttgattataaacataaagatattagtacaaaatattgatgcagaaagtaataatttattgggtagtttgtaattttaaaattatgttttaaaatggaccatgacatacttgccgtaagtgtaaagtatttctatttcttgcctttatatatcttctggcaaggac

SEQ ID NO: 7641 - DNA, 238 bp, synthetic construct
  misc_feature 1..238: note = promoter
  source 1..238: mol_type = other DNA
gagggcctatttcccatgagtccttcatatttgcatacgatgcaagaatgttagagagataattagaattaatttgattataaacataaagatattagtacaaaatattgatgcagaaagtaataatttattgggtagtttgtaattttaaaattatgttttaaaatggaccatgacatacttgccgtaagtgtaaagtatttctatttcttgcctttatatatcttctggcaaggac

SEQ ID NO: 7642 - DNA, 238 bp, synthetic construct; identical to SEQ ID NO: 7641
  misc_feature 1..238: note = promoter
  source 1..238: mol_type = other DNA

SEQ ID NO: 7643 - DNA, 238 bp, synthetic construct; identical to SEQ ID NO: 7641
  misc_feature 1..238: note = promoter
  source 1..238: mol_type = other DNA

SEQ ID NO: 7644 - DNA, 238 bp, synthetic construct; identical to SEQ ID NO: 7641
  misc_feature 1..238: note = promoter
  source 1..238: mol_type = other DNA

SEQ ID NO: 7645 - DNA, 238 bp, synthetic construct
  misc_feature 1..238: note = promoter
  source 1..238: mol_type = other DNA
gagggcctatttcccatgagtccttcatatttgcatatgatgcaagaatgttagagagataattagaattaatttgattataaacataaagatattagtacaaaatattgatgcagaaagtaataatttattgggtagtttgtaattttaaaattatgttttaaaatggaccatgacatacttgccgtaagtgtaaagtatttctatttcttgcctttatatatcttctggcaaggac

SEQ ID NO: 7646 - DNA, 238 bp, synthetic construct
  misc_feature 1..238: note = promoter
  source 1..238: mol_type = other DNA
gagggcctatttcccatgagtccttcatatttgcatataatgcaagaatgttagagagataattagaattaatttgattataaacataaagatattagtacaaaatattgatgcagaaagtaataatttattgggtagtttgtaattttaaaattatgttttaaaatggaccatgacatacttgccgtaagtgtaaagtatttctatttcttgcctttatatatcttctggcaaggac

SEQ ID NO: 7647 - DNA, 238 bp, synthetic construct
  misc_feature 1..238: note = promoter
  source 1..238: mol_type = other DNA
gagggcctatttcccatgagtccttcatatttgcatatactgcaagaatgttagagagataattagaattaatttgattataaacataaagatattagtacaaaatattgatgcagaaagtaataatttattgggtagtttgtaattttaaaattatgttttaaaatggaccatgacatacttgccgtaagtgtaaagtatttctatttcttgcctttatatatcttctggcaaggac

SEQ ID NO: 7648 - DNA, 238 bp, synthetic construct
  misc_feature 1..238: note = promoter
  source 1..238: mol_type = other DNA
gagggcctatttcccatgagtccttcatatttgcatatacggcaagaatgttagagagataattagaattaatttgattataaacataaagatattagtacaaaatattgatgcagaaagtaataatttattgggtagtttgtaattttaaaattatgttttaaaatggaccatgacatacttgccgtaagtgtaaagtatttctatttcttgcctttatatatcttctggcaaggac

SEQ ID NO: 7649 - DNA, 238 bp, synthetic construct
  misc_feature 1..238: note = promoter
  source 1..238: mol_type = other DNA
gagggcctatttcccatgagtccttcatatttgcatatacgacaagaatgttagagagataattagaattaatttgattataaacataaagatattagtacaaaatattgatgcagaaagtaataatttattgggtagtttgtaattttaaaattatgttttaaaatggaccatgacatacttgccgtaagtgtaaagtatttctatttcttgcctttatatatcttctggcaaggac

SEQ ID NO: 7650 - DNA, 238 bp, synthetic construct
  misc_feature 1..238: note = promoter
  source 1..238: mol_type = other DNA
gagggcctatttcccatgagtccttcatatttgcatatacgataagaatgttagagagataattagaattaatttgattataaacataaagatattagtacaaaatattgatgcagaaagtaataatttattgggtagtttgtaattttaaaattatgttttaaaatggaccatgacatacttgccgtaagtgtaaagtatttctatttcttgcctttatatatcttctggcaaggac

SEQ ID NO: 7651 - DNA, 238 bp, synthetic construct
  misc_feature 1..238: note = promoter
  source 1..238: mol_type = other DNA
gagggcctatttcccatgagtccttcatatttgcatatacgatgagaatgttagagagataattagaattaatttgattataaacataaagatattagtacaaaatattgatgcagaaagtaataatttattgggtagtttgtaattttaaaattatgttttaaaatggaccatgacatacttgccgtaagtgtaaagtatttctatttcttgcctttatatatcttctggcaaggac

SEQ ID NO: 7652 - DNA, 238 bp, synthetic construct
  misc_feature 1..238: note = promoter
  source 1..238: mol_type = other DNA
gagggcctatttcccatgagtccttcatatttgcatatacgatgcgaatgttagagagataattagaattaatttgattataaacataaagatattagtacaaaatattgatgcagaaagtaataatttattgggtagtttgtaattttaaaattatgttttaaaatggaccatgacatacttgccgtaagtgtaaagtatttctatttcttgcctttatatatcttctggcaaggac

SEQ ID NO: 7653 - DNA, 238 bp, synthetic construct
  misc_feature 1..238: note = promoter
  source 1..238: mol_type = other DNA
gagggcctatttcccatgagtccttcatatttgcatatacgatgcaaatgttagagagataattagaattaatttgattataaacataaagatattagtacaaaatattgatgcagaaagtaataatttattgggtagtttgtaattttaaaattatgttttaaaatggaccatgacatacttgccgtaagtgtaaagtatttctatttcttgcctttatatatcttctggcaaggac

SEQ ID NO: 7654 - DNA, 238 bp, synthetic construct; identical to SEQ ID NO: 7653
  misc_feature 1..238: note = promoter
  source 1..238: mol_type = other DNA

SEQ ID NO: 7655 - DNA, 238 bp, synthetic construct
  misc_feature 1..238: note = promoter
  source 1..238: mol_type = other DNA
gagggcctatttcccatgagtccttcatatttgcatatacgatgcaagtgttagagagataattagaattaatttgattataaacataaagatattagtacaaaatattgatgcagaaagtaataatttattgggtagtttgtaattttaaaattatgttttaaaatggaccatgacatacttgccgtaagtgtaaagtatttctatttcttgcctttatatatcttctggcaaggac

SEQ ID NO: 7656 - DNA, 238 bp, synthetic construct
  misc_feature 1..238: note = promoter
  source 1..238: mol_type = other DNA
gagggcctatttcccatgagtccttcatatttgcatatacgatgcaagagttagagagataattagaattaatttgattataaacataaagatattagtacaaaatattgatgcagaaagtaataatttattgggtagtttgtaattttaaaattatgttttaaaatggaccatgacatacttgccgtaagtgtaaagtatttctatttcttgcctttatatatcttctggcaaggac

SEQ ID NO: 7657 - DNA, 238 bp, synthetic construct
  misc_feature 1..238: note = promoter
  source 1..238: mol_type = other DNA
gagggcctatttcccatgagtccttcatatttgcatatacgatgcaagaattagagagataattagaattaatttgattataaacataaagatattagtacaaaatattgatgcagaaagtaataatttattgggtagtttgtaattttaaaattatgttttaaaatggaccatgacatacttgccgtaagtgtaaagtatttctatttcttgcctttatatatcttctggcaaggac

SEQ ID NO: 7658 - DNA, 238 bp, synthetic construct; identical to SEQ ID NO: 7657
  misc_feature 1..238: note = promoter
  source 1..238: mol_type = other DNA

SEQ ID NO: 7659 - DNA, 238 bp, synthetic construct
  misc_feature 1..238: note = promoter
  source 1..238: mol_type = other DNA
gagggcctatttcccatgagtccttcatatttgcatatacgatgcaagaatgagagagataattagaattaatttgattataaacataaagatattagtacaaaatattgatgcagaaagtaataatttattgggtagtttgtaattttaaaattatgttttaaaatggaccatgacatacttgccgtaagtgtaaagtatttctatttcttgcctttatatatcttctggcaaggac

SEQ ID NO: 7660 - DNA, 238 bp, synthetic construct
  misc_feature 1..238: note = promoter
  source 1..238: mol_type = other DNA
gagggcctatttcccatgagtccttcatatttgcatatacgatgcaagaatgtgagagataattagaattaatttgattataaacataaagatattagtacaaaatattgatgcagaaagtaataatttattgggtagtttgtaattttaaaattatgttttaaaatggaccatgacatacttgccgtaagtgtaaagtatttctatttcttgcctttatatatcttctggcaaggac

SEQ ID NO: 7661 - DNA, 238 bp, synthetic construct
  misc_feature 1..238: note = promoter
  source 1..238: mol_type = other DNA
gagggcctatttcccatgagtccttcatatttgcatatacgatgcaagaatgttagagataattagaattaatttgattataaacataaagatattagtacaaaatattgatgcagaaagtaataatttattgggtagtttgtaattttaaaattatgttttaaaatggaccatgacatacttgccgtaagtgtaaagtatttctatttcttgcctttatatatcttctggcaaggac

SEQ ID NO: 7662 - DNA, 238 bp, synthetic construct; identical to SEQ ID NO: 7661
  misc_feature 1..238: note = promoter
  source 1..238: mol_type = other DNA

SEQ ID NO: 7663 - DNA, 238 bp, synthetic construct; identical to SEQ ID NO: 7661
  misc_feature 1..238: note = promoter
  source 1..238: mol_type = other DNA

SEQ ID NO: 7664 - DNA, 238 bp, synthetic construct; identical to SEQ ID NO: 7661
  misc_feature 1..238: note = promoter
  source 1..238: mol_type = other DNA

SEQ ID NO: 7665 - DNA, 238 bp, synthetic construct; identical to SEQ ID NO: 7661
  misc_feature 1..238: note = promoter
  source 1..238: mol_type = other DNA

SEQ ID NO: 7666 - DNA, 238 bp, synthetic construct; identical to SEQ ID NO: 7661
  misc_feature 1..238: note = promoter
  source 1..238: mol_type = other DNA

SEQ ID NO: 7667 - DNA, 238 bp, synthetic construct
  misc_feature 1..238: note = promoter
  source 1..238: mol_type = other DNA
gagggcctatttcccatgagtccttcatatttgcatatacgatgcaagaatgttagagagaattagaattaatttgattataaacataaagatattagtacaaaatattgatgcagaaagtaataatttattgggtagtttgtaattttaaaattatgttttaaaatggaccatgacatacttgccgtaagtgtaaagtatttctatttcttgcctttatatatcttctggcaaggac

SEQ ID NO: 7668 - DNA, 238 bp, synthetic construct; identical to SEQ ID NO: 7667
  misc_feature 1..238: note = promoter
  source 1..238: mol_type = other DNA

SEQ ID NO: 7669 - DNA, 238 bp, synthetic construct
  misc_feature 1..238: note = promoter
  source 1..238: mol_type = other DNA
gagggcctatttcccatgagtccttcatatttgcatatacgatgcaagaatgttagagagatttagaattaatttgattataaacataaagatattagtacaaaatattgatgcagaaagtaataatttattgggtagtttgtaattttaaaattatgttttaaaatggaccatgacatacttgccgtaagtgtaaagtatttctatttcttgcctttatatatcttctggcaaggac

SEQ ID NO: 7670 - DNA, 238 bp, synthetic construct
  misc_feature 1..238: note = promoter
  source 1..238: mol_type = other DNA
gagggcctatttcccatgagtccttcatatttgcatatacgatgcaagaatgttagagagatatagaattaatttgattataaacataaagatattagtacaaaatattgatgcagaaagtaataatttattgggtagtttgtaattttaaaattatgttttaaaatggaccatgacatacttgccgtaagtgtaaagtatttctatttcttgcctttatatatcttctggcaaggac

SEQ ID NO: 7671 - DNA, 238 bp, synthetic construct
  misc_feature 1..238: note = promoter
  source 1..238: mol_type = other DNA
gagggcctatttcccatgagtccttcatatttgcatatacgatgcaagaatgttagagagataaagaattaatttgattataaacataaagatattagtacaaaatattgatgcagaaagtaataatttattgggtagtttgtaattttaaaattatgttttaaaatggaccatgacatacttgccgtaagtgtaaagtatttctatttcttgcctttatatatcttctggcaaggac

SEQ ID NO: 7672 - DNA, 238 bp, synthetic construct
  misc_feature 1..238: note = promoter
  source 1..238: mol_type = other DNA
gagggcctatttcccatgagtccttcatatttgcatatacgatgcaagaatgttagagagataatgaattaatttgattataaacataaagatattagtacaaaatattgatgcagaaagtaataatttattgggtagtttgtaattttaaaattatgttttaaaatggaccatgacatacttgccgtaagtgtaaagtatttctatttcttgcctttatatatcttctggcaaggac

SEQ ID NO: 7673 - DNA, 238 bp, synthetic construct
  misc_feature 1..238: note = promoter
  source 1..238: mol_type = other DNA
gagggcctatttcccatgagtccttcatatttgcatatacgatgcaagaatgttagagagataattaattaatttgattataaacataaagatattagtacaaaatattgatgcagaaagtaataatttattgggtagtttgtaattttaaaattatgttttaaaatggaccatgacatacttgccgtaagtgtaaagtatttctatttcttgcctttatatatcttctggcaaggac

SEQ ID NO: 7674 - DNA, 238 bp, synthetic construct; identical to SEQ ID NO: 7673
  misc_feature 1..238: note = promoter
  source 1..238: mol_type = other DNA

SEQ ID NO: 7675 - DNA, 238 bp, synthetic construct
  misc_feature 1..238: note = promoter
  source 1..238: mol_type = other DNA
gagggcctatttcccatgagtccttcatatttgcatatacgatgcaagaatgttagagagataattagttaatttgattataaacataaagatattagtacaaaatattgatgcagaaagtaataatttattgggtagtttgtaattttaaaattatgttttaaaatggaccatgacatacttgccgtaagtgtaaagtatttctatttcttgcctttatatatcttctggcaaggac

SEQ ID NO: 7676 - DNA, 238 bp, synthetic construct
  misc_feature 1..238: note = promoter
  source 1..238: mol_type = other DNA
gagggcctatttcccatgagtccttcatatttgcatatacgatgcaagaatgttagagagataattagataatttgattataaacataaagatattagtacaaaatattgatgcagaaagtaataatttattgggtagtttgtaattttaaaattatgttttaaaatggaccatgacatacttgccgtaagtgtaaagtatttctatttcttgcctttatatatcttctggcaaggac

SEQ ID NO: 7677 - DNA, 238 bp, synthetic construct
  misc_feature 1..238: note = promoter
  source 1..238: mol_type = other DNA
gagggcctatttcccatgagtccttcatatttgcatatacgatgcaagaatgttagagagataattagaaaatttgattataaacataaagatattagtacaaaatattgatgcagaaagtaataatttattgggtagtttgtaattttaaaattatgttttaaaatggaccatgacatacttgccgtaagtgtaaagtatttctatttcttgcctttatatatcttctggcaaggac

SEQ ID NO: 7678 - DNA, 238 bp, synthetic construct
  misc_feature 1..238: note = promoter
  source 1..238: mol_type = other DNA
gagggcctatttcccatgagtccttcatatttgcatatacgatgcaagaatgttagagagataattagaatatttgattataaacataaagatattagtacaaaatattgatgcagaaagtaataatttattgggtagtttgtaattttaaaattatgttttaaaatggaccatgacatacttgccgtaagtgtaaagtatttctatttcttgcctttatatatcttctggcaaggac

SEQ ID NO: 7679 - DNA, 238 bp, synthetic construct
  misc_feature 1..238: note = promoter
  source 1..238: mol_type = other DNA
gagggcctatttcccatgagtccttcatatttgcatatacgatgcaagaatgttagagagataattagaatttttgattataaacataaagatattagtacaaaatattgatgcagaaagtaataatttattgggtagtttgtaattttaaaattatgttttaaaatggaccatgacatacttgccgtaagtgtaaagtatttctatttcttgcctttatatatcttctggcaaggac

SEQ ID NO: 7680 - DNA, 238 bp, synthetic construct
  misc_feature 1..238: note = promoter
  source 1..238: mol_type = other DNA
gagggcctatttcccatgagtccttcatatttgcatatacgatgcaagaatgttagagagataattagaattattgattataaacataaagatattagtacaaaatattgatgcagaaagtaataatttattgggtagtttgtaattttaaaattatgttttaaaatggaccatgacatacttgccgtaagtgtaaagtatttctatttcttgcctttatatatcttctggcaaggac

SEQ ID NO: 7681 - DNA, 238 bp, synthetic construct
  misc_feature 1..238: note = promoter
  source 1..238: mol_type = other DNA
gagggcctatttcccatgagtccttcatatttgcatatacgatgcaagaatgttagagagataattagaattaatgattataaacataaagatattagtacaaaatattgatgcagaaagtaataatttattgggtagtttgtaattttaaaattatgttttaaaatggaccatgacatacttgccgtaagtgtaaagtatttctatttcttgcctttatatatcttctggcaaggac

SEQ ID NO: 7682 - DNA, 238 bp, synthetic construct; identical to SEQ ID NO: 7681
  misc_feature 1..238: note = promoter
  source 1..238: mol_type = other DNA

SEQ ID NO: 7683 - DNA, 238 bp, synthetic construct
  misc_feature 1..238: note = promoter
  source 1..238: mol_type = other DNA
gagggcctatttcccatgagtccttcatatttgcatatacgatgcaagaatgttagagagataattagaattaattattataaacataaagatattagtacaaaatattgatgcagaaagtaataatttattgggtagtttgtaattttaaaattatgttttaaaatggaccatgacatacttgccgtaagtgtaaagtatttctatttcttgcctttatatatcttctggcaaggac

SEQ ID NO: 7684 - DNA, 238 bp, synthetic construct
  misc_feature 1..238: note = promoter
  source 1..238: mol_type = other DNA
gagggcctatttcccatgagtccttcatatttgcatatacgatgcaagaatgttagagagataattagaattaatttttataaacataaagatattagtacaaaatattgatgcagaaagtaataatttattgggtagtttgtaattttaaaattatgttttaaaatggaccatgacatacttgccgtaagtgtaaagtatttctatttcttgcctttatatatcttctggcaaggac

SEQ ID NO: 7685 - DNA, 238 bp, synthetic construct
  misc_feature 1..238: note = promoter
  source 1..238: mol_type = other DNA
gagggcctatttcccatgagtccttcatatttgcatatacgatgcaagaatgttagagagataattagaattaatttgtataaacataaagatattagtacaaaatattgatgcagaaagtaataatttattgggtagtttgtaattttaaaattatgttttaaaatggaccatgacatacttgccgtaagtgtaaagtatttctatttcttgcctttatatatcttctggcaaggac

SEQ ID NO: 7686 - DNA, 238 bp, synthetic construct
  misc_feature 1..238: note = promoter
  source 1..238: mol_type = other DNA
gagggcctatttcccatgagtccttcatatttgcatatacgatgcaagaatgttagagagataattagaattaatttgaataaacataaagatattagtacaaaatattgatgcagaaagtaataatttattgggtagtttgtaattttaaaattatgttttaaaatggaccatgacatacttgccgtaagtgtaaagtatttctatttcttgcctttatatatcttctggcaaggac

SEQ ID NO: 7687 - DNA, 238 bp, synthetic construct
  misc_feature 1..238: note = promoter
  source 1..238: mol_type = other DNA
gagggcctatttcccatgagtccttcatatttgcatatacgatgcaagaatgttagagagataattagaattaatttgattaaacataaagatattagtacaaaatattgatgcagaaagtaataatttattgggtagtttgtaattttaaaattatgttttaaaatggaccatgacatacttgccgtaagtgtaaagtatttctatttcttgcctttatatatcttctggcaaggac

SEQ ID NO: 7688 - DNA, 238 bp, synthetic construct; identical to SEQ ID NO: 7687
  misc_feature 1..238: note = promoter
  source 1..238: mol_type = other DNA

SEQ ID NO: 7689 - DNA, 238 bp, synthetic construct; identical to SEQ ID NO: 7687
  misc_feature 1..238: note = promoter
  source 1..238: mol_type = other DNA

SEQ ID NO: 7690 - DNA, 238 bp, synthetic construct
  misc_feature 1..238: note = promoter
  source 1..238: mol_type = other DNA
gagggcctatttcccatgagtccttcatatttgcatatacgatgcaagaatgttagagagataattagaattaatttgattatacataaagatattagtacaaaatattgatgcagaaagtaataatttattgggtagtttgtaattttaaaattatgttttaaaatggaccatgacatacttgccgtaagtgtaaagtatttctatttcttgcctttatatatcttctggcaaggac

SEQ ID NO: 7691 - DNA, 238 bp, synthetic construct; identical to SEQ ID NO: 7690
  misc_feature 1..238: note = promoter
  source 1..238: mol_type = other DNA

SEQ ID NO: 7692 - DNA, 238 bp, synthetic construct
  misc_feature 1..238: note = promoter
  source 1..238: mol_type = other DNA
gagggcctatttcccatgagtccttcatatttgcatatacgatgcaagaatgttagagagataattagaattaatttgattataaataaagatattagtacaaaatattgatgcagaaagtaataatttattgggtagtttgtaattttaaaattatgttttaaaatggaccatgacatacttgccgtaagtgtaaagtatttctatttcttgcctttatatatcttctggcaaggac

SEQ ID NO: 7693 - DNA, 238 bp, synthetic construct; identical to SEQ ID NO: 7692
  misc_feature 1..238: note = promoter
  source 1..238: mol_type = other DNA

SEQ ID NO: 7694 - DNA, 238 bp, synthetic construct
  misc_feature 1..238: note = promoter
  source 1..238: mol_type = other DNA
gagggcctatttcccatgagtccttcatatttgcatatacgatgcaagaatgttagagagataattagaattaatttgattataaacaaagatattagtacaaaatattgatgcagaaagtaataatttattgggtagtttgtaattttaaaattatgttttaaaatggaccatgacatacttgccgtaagtgtaaagtatttctatttcttgcctttatatatcttctggcaaggac

SEQ ID NO: 7695 - DNA, 238 bp, synthetic construct; identical to SEQ ID NO: 7694
  misc_feature 1..238: note = promoter
  source 1..238: mol_type = other DNA

SEQ ID NO: 7696 - DNA, 238 bp, synthetic construct
  misc_feature 1..238: note = promoter
  source 1..238: mol_type = other DNA
gagggcctatttcccatgagtccttcatatttgcatatacgatgcaagaatgttagagagataattagaattaatttgattataaacatagatattagtacaaaatattgatgcagaaagtaataatttattgggtagtttgtaattttaaaattatgttttaaaatggaccatgacatacttgccgtaagtgtaaagtatttctatttcttgcctttatatatcttctggcaaggac

SEQ ID NO: 7697 - DNA, 238 bp, synthetic construct; identical to SEQ ID NO: 7696
  misc_feature 1..238: note = promoter
  source 1..238: mol_type = other DNA

SEQ ID NO: 7698 - DNA, 238 bp, synthetic construct
  misc_feature 1..238: note = promoter
  source 1..238: mol_type = other DNA
gagggcctatttcccatgagtccttcatatttgcatatacgatgcaagaatgttagagagataattagaattaatttgattataaacataaatattagtacaaaatattgatgcagaaagtaataatttattgggtagtttgtaattttaaaattatgttttaaaatggaccatgacatacttgccgtaagtgtaaagtatttctatttcttgcctttatatatcttctggcaaggac

SEQ ID NO: 7699 - DNA, 238 bp, synthetic construct; identical to SEQ ID NO: 7698
  misc_feature 1..238: note = promoter
  source 1..238: mol_type = other DNA

SEQ ID NO: 7700 - DNA, 238 bp, synthetic construct
  misc_feature 1..238: note = promoter
  source 1..238: mol_type = other DNA
gagggcctatttcccatgagtccttcatatttgcatatacgatgcaagaatgttagagagataattagaattaatttgattataaacataaagattagtacaaaatattgatgcagaaagtaataatttattgggtagtttgtaattttaaaattatgttttaaaatggaccatgacatacttgccgtaagtgtaaagtatttctatttcttgcctttatatatcttctggcaaggac

SEQ ID NO: 7701 - DNA, 238 bp, synthetic construct; identical to SEQ ID NO: 7700
  misc_feature 1..238: note = promoter
  source 1..238: mol_type = other DNA

SEQ ID NO: 7702 - DNA, 238 bp, synthetic construct; identical to SEQ ID NO: 7700
  misc_feature 1..238: note = promoter
  source 1..238: mol_type = other DNA

SEQ ID NO: 7703 - DNA, 238 bp, synthetic construct
  misc_feature 1..238: note = promoter
  source 1..238: mol_type = other DNA
gagggcctatttcccatgagtccttcatatttgcatatacgatgcaagaatgttagagagataattagaattaatttgattataaacataaagataagtacaaaatattgatgcagaaagtaataatttattgggtagtttgtaattttaaaattatgttttaaaatggaccatgacatacttgccgtaagtgtaaagtatttctatttcttgcctttatatatcttctggcaaggac

SEQ ID NO: 7704 - DNA, 238 bp, synthetic construct
  misc_feature 1..238: note = promoter
  source 1..238: mol_type = other DNA
gagggcctatttcccatgagtccttcatatttgcatatacgatgcaagaatgttagagagataattagaattaatttgattataaacataaagatatgtacaaaatattgatgcagaaagtaataatttattgggtagtttgtaattttaaaattatgttttaaaatggaccatgacatacttgccgtaagtgtaaagtatttctatttcttgcctttatatatcttctggcaaggac

SEQ ID NO: 7705 - DNA, 238 bp, synthetic construct
  misc_feature 1..238: note = promoter
  source 1..238: mol_type = other DNA
gagggcctatttcccatgagtccttcatatttgcatatacgatgcaagaatgttagagagataattagaattaatttgattataaacataaagatatttacaaaatattgatgcagaaagtaataatttattgggtagtttgtaattttaaaattatgttttaaaatggaccatgacatacttgccgtaagtgtaaagtatttctatttcttgcctttatatatcttctggcaaggac

SEQ ID NO: 7706 - DNA, 238 bp, synthetic construct
  misc_feature 1..238: note = promoter
  source 1..238: mol_type = other DNA
gagggcctatttcccatgagtccttcatatttgcatatacgatgcaagaatgttagagagataattagaattaatttgattataaacataaagatattaacaaaatattgatgcagaaagtaataatttattgggtagtttgtaattttaaaattatgttttaaaatggaccatgacatacttgccgtaagtgtaaagtatttctatttcttgcctttatatatcttctggcaaggac

SEQ ID NO: 7707 - DNA, 238 bp, synthetic construct
  misc_feature 1..238: note = promoter
  source 1..238: mol_type = other DNA
gagggcctatttcccatgagtccttcatatttgcatatacgatgcaagaatgttagagagataattagaattaatttgattataaacataaagatattagcaaaatattgatgcagaaagtaataatttattgggtagtttgtaattttaaaattatgttttaaaatggaccatgacatacttgccgtaagtgtaaagtatttctatttcttgcctttatatatcttctggcaaggac

SEQ ID NO: 7708 - DNA, 238 bp, synthetic construct
  misc_feature 1..238: note = promoter
  source 1..238: mol_type = other DNA
gagggcctatttcccatgagtccttcatatttgcatatacgatgcaagaatgttagagagataattagaattaatttgattataaacataaagatattagtaaaatattgatgcagaaagtaataatttattgggtagtttgtaattttaaaattatgttttaaaatggaccatgacatacttgccgtaagtgtaaagtatttctatttcttgcctttatatatcttctggcaaggac

SEQ ID NO: 7709 - DNA, 238 bp, synthetic construct; identical to SEQ ID NO: 7708
  misc_feature 1..238: note = promoter
  source 1..238: mol_type = other DNA

SEQ ID NO: 7710 - DNA, 238 bp, synthetic construct
  misc_feature 1..238: note = promoter
  source 1..238: mol_type = other DNA
gagggcctatttcccatgagtccttcatatttgcatatacgatgcaagaatgttagagagataattagaattaatttgattataaacataaagatattagtacaatattgatgcagaaagtaataatttattgggtagtttgtaattttaaaattatgttttaaaatggaccatgacatacttgccgtaagtgtaaagtatttctatttcttgcctttatatatcttctggcaaggac

SEQ ID NO: 7711 - DNA, 238 bp, synthetic construct; identical to SEQ ID NO: 7710
  misc_feature 1..238: note = promoter
  source 1..238: mol_type = other DNA

SEQ ID NO: 7712 - DNA, 238 bp, synthetic construct; identical to SEQ ID NO: 7710
  misc_feature 1..238: note = promoter
  source 1..238: mol_type = other DNA

SEQ ID NO: 7713 - DNA, 238 bp, synthetic construct
  misc_feature 1..238: note = promoter
  source 1..238: mol_type = other DNA
gagggcctatttcccatgagtccttcatatttgcatatacgatgcaagaatgttagagagataattagaattaatttgattataaacataaagatattagtacaaaattgatgcagaaagtaataatttattgggtagtttgtaattttaaaattatgttttaaaatggaccatgacatacttgccgtaagtgtaaagtatttctatttcttgcctttatatatcttctggcaaggac

SEQ ID NO: 7714 - DNA, 238 bp, synthetic construct; identical to SEQ ID NO: 7713
  misc_feature 1..238: note = promoter
  source 1..238: mol_type = other DNA

SEQ ID NO: 7715 - DNA, 238 bp, synthetic construct; identical to SEQ ID NO: 7713
  misc_feature 1..238: note = promoter
  source 1..238: mol_type = other DNA

SEQ ID NO: 7716 - DNA, 238 bp, synthetic construct
  misc_feature 1..238: note = promoter
  source 1..238: mol_type = other DNA
gagggcctatttcccatgagtccttcatatttgcatatacgatgcaagaatgttagagagataattagaattaatttgattataaacataaagatattagtacaaaatagatgcagaaagtaataatttattgggtagtttgtaattttaaaattatgttttaaaatggaccatgacatacttgccgtaagtgtaaagtatttctatttcttgcctttatatatcttctggcaaggac

SEQ ID NO: 7717 - DNA, 238 bp, synthetic construct
  misc_feature 1..238: note = promoter
  source 1..238: mol_type = other DNA
gagggcctatttcccatgagtccttcatatttgcatatacgatgcaagaatgttagagagataattagaattaatttgattataaacataaagatattagtacaaaatatatgcagaaagtaataatttattgggtagtttgtaattttaaaattatgttttaaaatggaccatgacatacttgccgtaagtgtaaagtatttctatttcttgcctttatatatcttctggcaaggac

SEQ ID NO: 7718 - DNA, 238 bp, synthetic construct
  misc_feature 1..238: note = promoter
  source 1..238: mol_type = other DNA
gagggcctatttcccatgagtccttcatatttgcatatacgatgcaagaatgttagagagataattagaattaatttgattataaacataaagatattagtacaaaatatttgcagaaagtaataatttattgggtagtttgtaattttaaaattatgttttaaaatggaccatgacatacttgccgtaagtgtaaagtatttctatttcttgcctttatatatcttctggcaaggac

SEQ ID NO: 7719 - DNA, 238 bp, synthetic construct
  misc_feature 1..238: note = promoter
  source 1..238: mol_type = other DNA
gagggcctatttcccatgagtccttcatatttgcatatacgatgcaagaatgttagagagataattagaattaatttgattataaacataaagatattagtacaaaatattggcagaaagtaataatttattgggtagtttgtaattttaaaattatgttttaaaatggaccatgacatacttgccgtaagtgtaaagtatttctatttcttgcctttatatatcttctggcaaggac

SEQ ID NO: 7720 - DNA, 238 bp, synthetic construct
  misc_feature 1..238: note = promoter
  source 1..238: mol_type = other DNA
gagggcctatttcccatgagtccttcatatttgcatatacgatgcaagaatgttagagagataattagaattaatttgattataaacataaagatattagtacaaaatattgacagaaagtaataatttattgggtagtttgtaattttaaaattatgttttaaaatggaccatgacatacttgccgtaagtgtaaagtatttctatttcttgcctttatatatcttctggcaaggac

SEQ ID NO: 7721 - DNA, 238 bp, synthetic construct
  misc_feature 1..238: note = promoter
  source 1..238: mol_type = other DNA
gagggcctatttcccatgagtccttcatatttgcatatacgatgcaagaatgttagagagataattagaattaatttgattataaacataaagatattagtacaaaatattgatagaaagtaataatttattgggtagtttgtaattttaaaattatgttttaaaatggaccatgacatacttgccgtaagtgtaaagtatttctatttcttgcctttatatatcttctggcaaggac

SEQ ID NO: 7722 - DNA, 238 bp, synthetic construct
  misc_feature 1..238: note = promoter
  source 1..238: mol_type = other DNA
gagggcctatttcccatgagtccttcatatttgcatatacgatgcaagaatgttagagagataattagaattaatttgattataaacataaagatattagtacaaaatattgatggaaagtaataatttattgggtagtttgtaattttaaaattatgttttaaaatggaccatgacatacttgccgtaagtgtaaagtatttctatttcttgcctttatatatcttctggcaaggac

SEQ ID NO: 7723 - DNA, 238 bp, synthetic construct
  misc_feature 1..238: note = promoter
  source 1..238: mol_type = other DNA
gagggcctatttcccatgagtccttcatatttgcatatacgatgcaagaatgttagagagataattagaattaatttgattataaacataaagatattagtacaaaatattgatgcaaagtaataatttattgggtagtttgtaattttaaaattatgttttaaaatggaccatgacatacttgccgtaagtgtaaagtatttctatttcttgcctttatatatcttctggcaaggac

SEQ ID NO: 7724 - DNA, 238 bp, synthetic construct; identical to SEQ ID NO: 7723
  misc_feature 1..238: note = promoter
  source 1..238: mol_type = other DNA

SEQ ID NO: 7725 - DNA, 238 bp, synthetic construct
  misc_feature 1..238: note = promoter
  source 1..238: mol_type = other DNA
gagggcctatttcccatgagtccttcatatttgcatatacgatgcaagaatgttagagagataattagaattaatttgattataaacataaagatattagtacaaaatattgatgcagagtaataatttattgggtagtttgtaattttaaaattatgttttaaaatggaccatgacatacttgccgtaagtgtaaagtatttctatttcttgcctttatatatcttctggcaaggac

SEQ ID NO: 7726 - DNA, 238 bp, synthetic construct; identical to SEQ ID NO: 7725
  misc_feature 1..238: note = promoter
  source 1..238: mol_type = other DNA

SEQ ID NO: 7727 - DNA, 238 bp, synthetic construct
  misc_feature 1..238: note = promoter
  source 1..238: mol_type = other DNA
gagggcctatttcccatgagtccttcatatttgcatatacgatgcaagaatgttagagagataattagaattaatttgattataaacataaagatattagtacaaaatattgatgcagaataataatttattgggtagtttgtaattttaaaattatgttttaaaatggaccatgacatacttgccgtaagtgtaaagtatttctatttcttgcctttatatatcttctggcaaggac

SEQ ID NO: 7728 - DNA, 238 bp, synthetic construct
  misc_feature 1..238: note = promoter
  source 1..238: mol_type = other DNA
gagggcctatttcccatgagtccttcatatttgcatatacgatgcaagaatgttagagagataattagaattaatttgattataaacataaagatattagtacaaaatattgatgcagaaaaataatttattgggtagtttgtaattttaaaattatgttttaaaatggaccatgacatacttgccgtaagtgtaaagtatttctatttcttgcctttatatatcttctggcaaggac

SEQ ID NO: 7729 - DNA, 238 bp, synthetic construct
  misc_feature 1..238: note = promoter
  source 1..238: mol_type = other DNA
gagggcctatttcccatgagtccttcatatttgcatatacgatgcaagaatgttagagagataattagaattaatttgattataaacataaagatattagtacaaaatattgatgcagaaagataatttattgggtagtttgtaattttaaaattatgttttaaaatggaccatgacatacttgccgtaagtgtaaagtatttctatttcttgcctttatatatcttctggcaaggac

SEQ ID NO: 7730 - DNA, 238 bp, synthetic construct
  misc_feature 1..238: note = promoter
  source 1..238: mol_type = other DNA
gagggcctatttcccatgagtccttcatatttgcatatacgatgcaagaatgttagagagataattagaattaatttgattataaacataaagatattagtacaaaatattgatgcagaaagttaatttattgggtagtttgtaattttaaaattatgttttaaaatggaccatgacatacttgccgtaagtgtaaagtatttctatttcttgcctttatatatcttctggcaaggac

SEQ ID NO: 7731 - DNA, 238 bp, synthetic construct
  misc_feature 1..238: note = promoter
  source 1..238: mol_type = other DNA
gagggcctatttcccatgagtccttcatatttgcatatacgatgcaagaatgttagagagataattagaattaatttgattataaacataaagatattagtacaaaatattgatgcagaaagtaaatttattgggtagtttgtaattttaaaattatgttttaaaatggaccatgacatacttgccgtaagtgtaaagtatttctatttcttgcctttatatatcttctggcaaggac

SEQ ID NO: 7732 - DNA, 238 bp, synthetic construct; identical to SEQ ID NO: 7731
  misc_feature 1..238: note = promoter
  source 1..238: mol_type = other DNA

SEQ ID NO: 7733 - DNA, 238 bp, synthetic construct
  misc_feature 1..238: note = promoter
  source 1..238: mol_type = other DNA
gagggcctatttcccatgagtccttcatatttgcatatacgatgcaagaatgttagagagataattagaattaatttgattataaacataaagatattagtacaaaatattgatgcagaaagtaattttattgggtagtttgtaattttaaaattatgttttaaaatggaccatgacatacttgccgtaagtgtaaagtatttctatttcttgcctttatatatcttctggcaaggac

SEQ ID NO: 7734 - DNA, 238 bp, synthetic construct
  misc_feature 1..238: note = promoter
  source 1..238: mol_type = other DNA
gagggcctatttcccatgagtccttcatatttgcatatacgatgcaagaatgttagagagataattagaattaatttgattataaacataaagatattagtacaaaatattgatgcagaaagtaatattattgggtagtttgtaattttaaaattatgttttaaaatggaccatgacatacttgccgtaagtgtaaagtatttctatttcttgcctttatatatcttctggcaaggac

SEQ ID NO: 7735 - DNA, 238 bp, synthetic construct
  misc_feature 1..238: note = promoter
  source 1..238: mol_type = other DNA
gagggcctatttcccatgagtccttcatatttgcatatacgatgcaagaatgttagagagataattagaattaatttgattataaacataaagatattagtacaaaatattgatgcagaaagtaataatattgggtagtttgtaattttaaaattatgttttaaaatggaccatgacatacttgccgtaagtgtaaagtatttctatttcttgcctttatatatcttctggcaaggac

SEQ ID NO: 7736 - DNA, 238 bp, synthetic construct; identical to SEQ ID NO: 7735
  misc_feature 1..238: note = promoter
  source 1..238: mol_type = other DNA

SEQ ID NO: 7737 - DNA, 238 bp, synthetic construct
  misc_feature 1..238: note = promoter
  source 1..238: mol_type = other DNA
gagggcctatttcccatgagtccttcatatttgcatatacgatgcaagaatgttagagagataattagaattaatttgattataaacataaagatattagtacaaaatattgatgcagaaagtaataattttgggtagtttgtaattttaaaattatgttttaaaatggaccatgacatacttgccgtaagtgtaaagtatttctatttcttgcctttatatatcttctggcaaggac

SEQ ID NO: 7738 - DNA, 238 bp, synthetic construct; identical to SEQ ID NO: 7737
  misc_feature 1..238: note = promoter
  source 1..238: mol_type = other DNA

SEQ ID NO: 7739 - DNA, 238 bp, synthetic construct
  misc_feature 1..238: note = promoter
  source 1..238: mol_type = other DNA
gagggcctatttcccatgagtccttcatatttgcatatacgatgcaagaatgttagagagataattagaattaatttgattataaacataaagatattagtacaaaatattgatgcagaaagtaataatttagggtagtttgtaattttaaaattatgttttaaaatggaccatgacatacttgccgtaagtgtaaagtatttctatttcttgcctttatatatcttctggcaaggac

SEQ ID NO: 7740 - DNA, 238 bp, synthetic construct
  misc_feature 1..238: note = promoter
  source 1..238: mol_type = other DNA
gagggcctatttcccatgagtccttcatatttgcatatacgatgcaagaatgttagagagataattagaattaatttgattataaacataaagatattagtacaaaatattgatgcagaaagtaataatttatggtagtttgtaattttaaaattatgttttaaaatggaccatgacatacttgccgtaagtgtaaagtatttctatttcttgcctttatatatcttctggcaaggac

SEQ ID NO: 7741 - DNA, 238 bp, synthetic construct
  misc_feature 1..238: note = promoter
  source 1..238: mol_type = other DNA
gagggcctatttcccatgagtccttcatatttgcatatacgatgcaagaatgttagagagataattagaattaatttgattataaacataaagatattagtacaaaatattgatgcagaaagtaataatttattgtagtttgtaattttaaaattatgttttaaaatggaccatgacatacttgccgtaagtgtaaagtatttctatttcttgcctttatatatcttctggcaaggac

SEQ ID NO: 7742 - DNA, 238 bp, synthetic construct; identical to SEQ ID NO: 7741
  misc_feature 1..238: note = promoter
  source 1..238: mol_type = other DNA

SEQ ID NO: 7743 - DNA, 238 bp, synthetic construct
  misc_feature 1..238: note = promoter
  source 1..238: mol_type = other DNA
gagggcctatttcccatgagtccttcatatttgcatatacgatgcaagaatgttagagagataattagaattaatttgattataaacataaagatattagtacaaaatattgatgcagaaagtaataatttattggagtttgtaattttaaaattatgttttaaaatggaccatgacatacttgccgtaagtgtaaagtatttctatttcttgcctttatatatcttctggcaaggac

SEQ ID NO: 7744 - DNA, 238 bp, synthetic construct
  misc_feature 1..238: note = promoter
  source 1..238: mol_type = other DNA
gagggcctatttcccatgagtccttcatatttgcatatacgatgcaagaatgttagagagataattagaattaatttgattataaacataaagatattagtacaaaatattgatgcagaaagtaataatttattggggtttgtaattttaaaattatgttttaaaatggaccatgacatacttgccgtaagtgtaaagtatttctatttcttgcctttatatatcttctggcaaggac

SEQ ID NO: 7745 - DNA, 238 bp, synthetic construct
  misc_feature 1..238: note = promoter
  source 1..238: mol_type = other DNA
gagggcctatttcccatgagtccttcatatttgcatatacgatgcaagaatgttagagagataattagaattaatttgattataaacataaagatattagtacaaaatattgatgcagaaagtaataatttattgggttttgtaattttaaaattatgttttaaaatggaccatgacatacttgccgtaagtgtaaagtatttctatttcttgcctttatatatcttctggcaaggac

SEQ ID NO: 7746 - DNA, 238 bp, synthetic construct
  misc_feature 1..238: note = promoter
  source 1..238: mol_type = other DNA
gagggcctatttcccatgagtccttcatatttgcatatacgatgcaagaatgttagagagataattagaattaatttgattataaacataaagatattagtacaaaatattgatgcagaaagtaataatttattgggtattgtaattttaaaattatgttttaaaatggaccatgacatacttgccgtaagtgtaaagtatttctatttcttgcctttatatatcttctggcaaggac

SEQ ID NO: 7747 - DNA, 238 bp, synthetic construct
  misc_feature 1..238: note = promoter
  source 1..238: mol_type = other DNA
gagggcctatttcccatgagtccttcatatttgcatatacgatgcaagaatgttagagagataattagaattaatttgattataaacataaagatattagtacaaaatattgatgcagaaagtaataatttattgggtagtgtaattttaaaattatgttttaaaatggaccatgacatacttgccgtaagtgtaaagtatttctatttcttgcctttatatatcttctggcaaggac

SEQ ID NO: 7748 - DNA, 238 bp, synthetic construct; identical to SEQ ID NO: 7747
  misc_feature 1..238: note = promoter
  source 1..238: mol_type = other DNA

SEQ ID NO: 7749 - DNA, 238 bp, synthetic construct
  misc_feature 1..238: note = promoter
  source 1..238: mol_type = other DNA
gagggcctatttcccatgagtccttcatatttgcatatacgatgcaagaatgttagagagataattagaattaatttgattataaacataaagatattagtacaaaatattgatgcagaaagtaataatttattgggtagtttaattttaaaattatgttttaaaatggaccatgacatacttgccgtaagtgtaaagtatttctatttcttgcctttatatatcttctggcaaggac

SEQ ID NO: 7750 - DNA, 238 bp, synthetic construct; identical to SEQ ID NO: 7749
  misc_feature 1..238: note = promoter
  source 1..238: mol_type = other DNA

SEQ ID NO: 7751 - DNA, 238 bp, synthetic construct
  misc_feature 1..238: note = promoter
  source 1..238: mol_type = other DNA
gagggcctatttcccatgagtccttcatatttgcatatacgatgcaagaatgttagagagataattagaattaatttgattataaacataaagatattagtacaaaatattgatgcagaaagtaataatttattgggtagtttgattttaaaattatgttttaaaatggaccatgacatacttgccgtaagtgtaaagtatttctatttcttgcctttatatatcttctggcaaggac

SEQ ID NO: 7752 - DNA, 238 bp, synthetic construct
  misc_feature 1..238: note = promoter
  source 1..238: mol_type = other DNA
gagggcctatttcccatgagtccttcatatttgcatatacgatgcaagaatgttagagagataattagaattaatttgattataaacataaagatattagtacaaaatattgatgcagaaagtaataatttattgggtagtttgtttttaaaattatgttttaaaatggaccatgacatacttgccgtaagtgtaaagtatttctatttcttgcctttatatatcttctggcaaggac

SEQ ID NO: 7753 - DNA, 238 bp, synthetic construct
  misc_feature 1..238: note = promoter
  source 1..238: mol_type = other DNA
gagggcctatttcccatgagtccttcatatttgcatatacgatgcaagaatgttagagagataattagaattaatttgattataaacataaagatattagtacaaaatattgatgcagaaagtaataatttattgggtagtttgtatttaaaattatgttttaaaatggaccatgacatacttgccgtaagtgtaaagtatttctatttcttgcctttatatatcttctggcaaggac

SEQ ID NO: 7754 - DNA, 238 bp, synthetic construct
  misc_feature 1..238: note = promoter
  source 1..238: mol_type = other DNA
gagggcctatttcccatgagtccttcatatttgcatatacgatgcaagaatgttagagagataattagaattaatttgattataaacataaagatattagtacaaaatattgatgcagaaagtaataatttattgggtagtttgtaattaaaattatgttttaaaatggaccatgacatacttgccgtaagtgtaaagtatttctatttcttgcctttatatatcttctggcaaggac

SEQ ID NO: 7755 - DNA, 238 bp, synthetic construct; identical to SEQ ID NO: 7754
  misc_feature 1..238: note = promoter
  source 1..238: mol_type = other DNA

SEQ ID NO: 7756 - DNA, 238 bp, synthetic construct; identical to SEQ ID NO: 7754
  misc_feature 1..238: note = promoter
  source 1..238: mol_type = other DNA

SEQ ID NO: 7757 - DNA, 238 bp, synthetic construct
  misc_feature 1..238: note = promoter
  source 1..238: mol_type = other DNA
gagggcctatttcccatgagtccttcatatttgcatatacgatgcaagaatgttagagagataattagaattaatttgattataaacataaagatattagtacaaaatattgatgcagaaagtaataatttattgggtagtttgtaatttaaattatgttttaaaatggaccatgacatacttgccgtaagtgtaaagtatttctatttcttgcctttatatatcttctggcaaggac

SEQ ID NO: 7758 - DNA, 238 bp, synthetic construct
  misc_feature 1..238: note = promoter
  source 1..238: mol_type = other DNA
gagggcctatttcccatgagtccttcatatttgcatatacgatgcaagaatgttagagagataattagaattaatttgattataaacataaagatattagtacaaaatattgatgcagaaagtaataatttattgggtagtttgtaattttaattatgttttaaaatggaccatgacatacttgccgtaagtgtaaagtatttctatttcttgcctttatatatcttctggcaaggac

SEQ ID NO: 7759 - DNA, 238 bp, synthetic construct; identical to SEQ ID NO: 7758
  misc_feature 1..238: note = promoter
  source 1..238: mol_type = other DNA

SEQ ID NO: 7760 - DNA, 238 bp, synthetic construct; identical to SEQ ID NO: 7758
  misc_feature 1..238: note = promoter
  source 1..238: mol_type = other DNA

SEQ ID NO: 7761 - DNA, 238 bp, synthetic construct
  misc_feature 1..238: note = promoter
  source 1..238: mol_type = other DNA
gagggcctatttcccatgagtccttcatatttgcatatacgatgcaagaatgttagagagataattagaattaatttgattataaacataaagatattagtacaaaatattgatgcagaaagtaataatttattgggtagtttgtaattttaaatatgttttaaaatggaccatgacatacttgccgtaagtgtaaagtatttctatttcttgcctttatatatcttctggcaaggac

SEQ ID NO: 7762 - DNA, 238 bp, synthetic construct
  misc_feature 1..238: note = promoter
  source 1..238: mol_type = other DNA
gagggcctatttcccatgagtccttcatatttgcatatacgatgcaagaatgttagagagataattagaattaatttgattataaacataaagatattagtacaaaatattgatgcagaaagtaataatttattgggtagtttgtaattttaaaaatgttttaaaatggaccatgacatacttgccgtaagtgtaaagtatttctatttcttgcctttatatatcttctggcaaggac

SEQ ID NO: 7763 - DNA, 238 bp, synthetic construct
  misc_feature 1..238: note = promoter
  source 1..238: mol_type = other DNA
gagggcctatttcccatgagtccttcatatttgcatatacgatgcaagaatgttagagagataattagaattaatttgattataaacataaagatattagtacaaaatattgatgcagaaagtaataatttattgggtagtttgtaattttaaaattgttttaaaatggaccatgacatacttgccgtaagtgtaaagtatttctatttcttgcctttatatatcttctggcaaggac

SEQ ID NO: 7764 - DNA, 238 bp, synthetic construct; identical to SEQ ID NO: 7763
  misc_feature 1..238: note = promoter
  source 1..238: mol_type = other DNA

SEQ ID NO: 7765 - DNA, 238 bp, synthetic construct
  misc_feature 1..238: note = promoter
  source 1..238: mol_type = other DNA
gagggcctatttcccatgagtccttcatatttgcatatacgatgcaagaatgttagagagataattagaattaatttgattataaacataaagatattagtacaaaatattgatgcagaaagtaataatttattgggtagtttgtaattttaaaattattttaaaatggaccatgacatacttgccgtaagtgtaaagtatttctatttcttgcctttatatatcttctggcaaggac

SEQ ID NO: 7766 - DNA, 238 bp, synthetic construct; identical to SEQ ID NO: 7765
  misc_feature 1..238: note = promoter
  source 1..238: mol_type = other DNA

SEQ ID NO: 7767 - DNA, 238 bp, synthetic construct
  misc_feature 1..238: note = promoter
  source 1..238: mol_type = other DNA
gagggcctatttcccatgagtccttcatatttgcatatacgatgcaagaatgttagagagataattagaattaatttgattataaacataaagatattagtacaaaatattgatgcagaaagtaataatttattgggtagtttgtaattttaaaattatgttaaaatggaccatgacatacttgccgtaagtgtaaagtatttctatttcttgcctttatatatcttctggcaaggac

SEQ ID NO: 7768 - DNA, 238 bp, synthetic construct; identical to SEQ ID NO: 7767
  misc_feature 1..238: note = promoter
  source 1..238: mol_type = other DNA

SEQ ID NO: 7769 - DNA, 238 bp, synthetic construct; identical to SEQ ID NO: 7767
  misc_feature 1..238: note = promoter
  source 1..238: mol_type = other DNA

SEQ ID NO: 7770 - DNA, 238 bp, synthetic construct
  misc_feature 1..238: note = promoter
  source 1..238: mol_type = other DNA
gagggcctatttcccatgagtccttcatatttgcatatacgatgcaagaatgttagagagataattagaattaatttgattataaacataaagatattagtacaaaatattgatgcagaaagtaataatttattgggtagtttgtaattttaaaattatgtttaaatggaccatgacatacttgccgtaagtgtaaagtatttctatttcttgcctttatatatcttctggcaaggac

SEQ ID NO: 7771 - DNA, 238 bp, synthetic construct
  misc_feature 1..238: note = promoter
  source 1..238: mol_type = other DNA
gagggcctatttcccatgagtccttcatatttgcatatacgatgcaagaatgttagagagataattagaattaatttgattataaacataaagatattagtacaaaatattgatgcagaaagtaataatttattgggtagtttgtaattttaaaattatgttttaatggaccatgacatacttgccgtaagtgtaaagtatttctatttcttgcctttatatatcttctggcaaggac

SEQ ID NO: 7772 - DNA, 238 bp, synthetic construct; identical to SEQ ID NO: 7771
  misc_feature 1..238: note = promoter
  source 1..238: mol_type = other DNA

SEQ ID NO: 7773 - DNA, 238 bp, synthetic construct; identical to SEQ ID NO: 7771
  misc_feature 1..238: note = promoter
  source 1..238: mol_type = other DNA

SEQ ID NO: 7774 - DNA, 238 bp, synthetic construct
  misc_feature 1..238: note = promoter
  source 1..238: mol_type = other DNA
gagggcctatttcccatgagtccttcatatttgcatatacgatgcaagaatgttagagagataattagaattaatttgattataaacataaagatattagtacaaaatattgatgcagaaagtaataatttattgggtagtttgtaattttaaaattatgttttaaaggaccatgacatacttgccgtaagtgtaaagtatttctatttcttgcctttatatatcttctggcaaggac

SEQ ID NO: 7775 - DNA, 238 bp, synthetic construct
  misc_feature 1..238: note = promoter
  source 1..238: mol_type = other DNA
gagggcctatttcccatgagtccttcatatttgcatatacgatgcaagaatgttagagagataattagaattaatttgattataaacataaagatattagtacaaaatattgatgcagaaagtaataatttattgggtagtttgtaattttaaaattatgttttaaaagaccatgacatacttgccgtaagtgtaaagtatttctatttcttgcctttatatatcttctggcaaggac

SEQ ID NO: 7776 - DNA, 238 bp, synthetic construct
  misc_feature 1..238: note = promoter
  source 1..238: mol_type = other DNA
gagggcctatttcccatgagtccttcatatttgcatatacgatgcaagaatgttagagagataattagaattaatttgattataaacataaagatattagtacaaaatattgatgcagaaagtaataatttattgggtagtttgtaattttaaaattatgttttaaaataccatgacatacttgccgtaagtgtaaagtatttctatttcttgcctttatatatcttctggcaaggac

SEQ ID NO: 7777 - DNA, 238 bp, synthetic construct
  misc_feature 1..238: note = promoter
  source 1..238: mol_type = other DNA
gagggcctatttcccatgagtccttcatatttgcatatacgatgcaagaatgttagagagataattagaattaatttgattataaacataaagatattagtacaaaatattgatgcagaaagtaataatttattgggtagtttgtaattttaaaattatgttttaaaatgccatgacatacttgccgtaagtgtaaagtatttctatttcttgcctttatatatcttctggcaaggac

SEQ ID NO: 7778 - DNA, 238 bp, synthetic construct
  misc_feature 1..238: note = promoter
  source 1..238: mol_type = other DNA
gagggcctatttcccatgagtccttcatatttgcatatacgatgcaagaatgttagagagataattagaattaatttgattataaacataaagatattagtacaaaatattgatgcagaaagtaataatttattgggtagtttgtaattttaaaattatgttttaaaatggcatgacatacttgccgtaagtgtaaagtatttctatttcttgcctttatatatcttctggcaaggac

SEQ ID NO: 7779 - DNA, 238 bp, synthetic construct
  misc_feature 1..238: note = promoter
  source 1..238: mol_type = other DNA
gagggcctatttcccatgagtccttcatatttgcatatacgatgcaagaatgttagagagataattagaattaatttgattataaacataaagatattagtacaaaatattgatgcagaaagtaataatttattgggtagtttgtaattttaaaattatgttttaaaatggaatgacatacttgccgtaagtgtaaagtatttctatttcttgcctttatatatcttctggcaaggac

SEQ ID NO: 7780 - DNA, 238 bp, synthetic construct
  misc_feature 1..238: note = promoter
  source 1..238: mol_type = other DNA
gagggcctatttcccatgagtccttcatatttgcatatacgatgcaagaatgttagagagataattagaattaatttgattataaacataaagatattagtacaaaatattgatgcagaaagtaataatttattgggtagtttgtaattttaaaattatgttttaaaatggactgacatacttgccgtaagtgtaaagtatttctatttcttgcctttatatatcttctggcaaggac

SEQ ID NO: 7781 - DNA, 238 bp, synthetic construct
  misc_feature 1..238: note = promoter
  source 1..238: mol_type = other DNA
gagggcctatttcccatgagtccttcatatttgcatatacgatgcaagaatgttagagagataattagaattaatttgattataaacataaagatattagtacaaaatattgatgcagaaagtaataatttattgggtagtttgtaattttaaaattatgttttaaaatggaccgacatacttgccgtaagtgtaaagtatttctatttcttgcctttatatatcttctggcaaggac

SEQ ID NO: 7782 - DNA, 238 bp, synthetic construct
  misc_feature 1..238: note = promoter
  source 1..238: mol_type = other DNA
gagggcctatttcccatgagtccttcatatttgcatatacgatgcaagaatgttagagagataattagaattaatttgattataaacataaagatattagtacaaaatattgatgcagaaagtaataatttattgggtagtttgtaattttaaaattatgttttaaaatggaccaacatacttgccgtaagtgtaaagtatttctatttcttgcctttatatatcttctggcaaggac

SEQ ID NO: 7783 - DNA, 238 bp, synthetic construct
  misc_feature 1..238: note = promoter
  source 1..238: mol_type = other DNA
gagggcctatttcccatgagtccttcatatttgcatatacgatgcaagaatgttagagagataattagaattaatttgattataaacataaagatattagtacaaaatattgatgcagaaagtaataatttattgggtagtttgtaattttaaaattatgttttaaaatggaccatcatacttgccgtaagtgtaaagtatttctatttcttgcctttatatatcttctggcaaggac

SEQ ID NO: 7784 - DNA, 238 bp, synthetic construct
  misc_feature 1..238: note = promoter
  source 1..238: mol_type = other DNA
gagggcctatttcccatgagtccttcatatttgcatatacgatgcaagaatgttagagagataattagaattaatttgattataaacataaagatattagtacaaaatattgatgcagaaagtaataatttattgggtagtttgtaattttaaaattatgttttaaaatggaccatgatacttgccgtaagtgtaaagtatttctatttcttgcctttatatatcttctggcaaggac

SEQ ID NO: 7785 - DNA, 238 bp, synthetic construct; identical to SEQ ID NO: 7784
  misc_feature 1..238: note = promoter
  source 1..238: mol_type = other DNA

SEQ ID NO: 7786 - DNA, 238 bp, synthetic construct
  misc_feature 1..238: note = promoter
  source 1..238: mol_type = other DNA
gagggcctatttcccatgagtccttcatatttgcatatacgatgcaagaatgttagagagataattagaattaatttgattataaacataaagatattagtacaaaatattgatgcagaaagtaataatttattgggtagtttgtaattttaaaattatgttttaaaatggaccatgacacttgccgtaagtgtaaagtatttctatttcttgcctttatatatcttctggcaaggac

SEQ ID NO: 7787 - DNA, 238 bp, synthetic construct; identical to SEQ ID NO: 7786
  misc_feature 1..238: note = promoter
  source 1..238: mol_type = other DNA

SEQ ID NO: 7788 - DNA, 238 bp, synthetic construct
  misc_feature 1..238: note = promoter
  source 1..238: mol_type = other DNA
gagggcctatttcccatgagtccttcatatttgcatatacgatgcaagaatgttagagagataattagaattaatttgattataaacataaagatattagtacaaaatattgatgcagaaagtaataatttattgggtagtttgtaattttaaaattatgttttaaaatggaccatgacatttgccgtaagtgtaaagtatttctatttcttgcctttatatatcttctggcaaggac

SEQ ID NO: 7789 - DNA, 238 bp, synthetic construct
  misc_feature 1..238: note = promoter
  source 1..238: mol_type = other DNA
gagggcctatttcccatgagtccttcatatttgcatatacgatgcaagaatgttagagagataattagaattaatttgattataaacataaagatattagtacaaaatattgatgcagaaagtaataatttattgggtagtttgtaattttaaaattatgttttaaaatggaccatgacatatgccgtaagtgtaaagtatttctatttcttgcctttatatatcttctggcaaggac

SEQ ID NO: 7790 - DNA, 238 bp, synthetic construct
  misc_feature 1..238: note = promoter
  source 1..238: mol_type = other DNA
gagggcctatttcccatgagtccttcatatttgcatatacgatgcaagaatgttagagagataattagaattaatttgattataaacataaagatattagtacaaaatattgatgcagaaagtaataatttattgggtagtttgtaattttaaaattatgttttaaaatggaccatgacatacgccgtaagtgtaaagtatttctatttcttgcctttatatatcttctggcaaggac

SEQ ID NO: 7791 - DNA, 238 bp, synthetic construct
  misc_feature 1..238: note = promoter
  source 1..238: mol_type = other DNA
gagggcctatttcccatgagtccttcatatttgcatatacgatgcaagaatgttagagagataattagaattaatttgattataaacataaagatattagtacaaaatattgatgcagaaagtaataatttattgggtagtttgtaattttaaaattatgttttaaaatggaccatgacatactccgtaagtgtaaagtatttctatttcttgcctttatatatcttctggcaaggac

SEQ ID NO: 7792 - DNA, 238 bp, synthetic construct
  misc_feature 1..238: note = promoter
  source 1..238: mol_type = other DNA
gagggcctatttcccatgagtccttcatatttgcatatacgatgcaagaatgttagagagataattagaattaatttgattataaacataaagatattagtacaaaatattgatgcagaaagtaataatttattgggtagtttgtaattttaaaattatgttttaaaatggaccatgacatacttcgtaagtgtaaagtatttctatttcttgcctttatatatcttctggcaaggac

SEQ ID NO: 7793 - DNA, 238 bp, synthetic construct
  misc_feature 1..238: note = promoter
  source 1..238: mol_type = other DNA
gagggcctatttcccatgagtccttcatatttgcatatacgatgcaagaatgttagagagataattagaattaatttgattataaacataaagatattagtacaaaatattgatgcagaaagtaataatttattgggtagtttgtaattttaaaattatgttttaaaatggaccatgacatacttggtaagtgtaaagtatttctatttcttgcctttatatatcttctggcaaggac

SEQ ID NO: 7794 - DNA, 238 bp, synthetic construct
  misc_feature 1..238: note = promoter
  source 1..238: mol_type = other DNA
gagggcctatttcccatgagtccttcatatttgcatatacgatgcaagaatgttagagagataattagaattaatttgattataaacataaagatattagtacaaaatattgatgcagaaagtaataatttattgggtagtttgtaattttaaaattatgttttaaaatggaccatgacatacttgctaagtgtaaagtatttctatttcttgcctttatatatcttctggcaaggac

SEQ ID NO: 7795 - DNA, 238 bp, synthetic construct
  misc_feature 1..238: note = promoter
  source 1..238: mol_type = other DNA
gagggcctatttcccatgagtccttcatatttgcatatacgatgcaagaatgttagagagataattagaattaatttgattataaacataaagatattagtacaaaatattgatgcagaaagtaataatttattgggtagtttgtaattttaaaattatgttttaaaatggaccatgacatacttgccaagtgtaaagtatttctatttcttgcctttatatatcttctggcaaggac

SEQ ID NO: 7796 - DNA, 238 bp, synthetic construct
  misc_feature 1..238: note = promoter
  source 1..238: mol_type = other DNA
gagggcctatttcccatgagtccttcatatttgcatatacgatgcaagaatgttagagagataattagaattaatttgattataaacataaagatattagtacaaaatattgatgcagaaagtaataatttattgggtagtttgtaattttaaaattatgttttaaaatggaccatgacatacttgccgagtgtaaagtatttctatttcttgcctttatatatcttctggcaaggac

SEQ ID NO: 7797 - DNA, 238 bp, synthetic construct
  misc_feature 1..238: note = promoter
  source 1..238: mol_type = other DNA
gagggcctatttcccatgagtccttcatatttgcatatacgatgcaagaatgttagagagataattagaattaatttgattataaacataaagatattagtacaaaatattgatgcagaaagtaataatttattgggtagtttgtaattttaaaattatgttttaaaatggaccatgacatacttgccgtgtgtaaagtatttctatttcttgcctttatatatcttctggcaaggac

SEQ ID NO: 7798 - DNA, 238 bp, synthetic construct
  misc_feature 1..238: note = promoter
  source 1..238: mol_type = other DNA
gagggcctatttcccatgagtccttcatatttgcatatacgatgcaagaatgttagagagataattagaattaatttgattataaacataaagatattagtacaaaatattgatgcagaaagtaataatttattgggtagtttgtaattttaaaattatgttttaaaatggaccatgacatacttgccgtatgtaaagtatttctatttcttgcctttatatatcttctggcaaggac

SEQ ID NO: 7799 - DNA, 238 bp, synthetic construct
  misc_feature 1..238: note = promoter
  source 1..238: mol_type = other DNA
gagggcctatttcccatgagtccttcatatttgcatatacgatgcaagaatgttagagagataattagaattaatttgattataaacataaagatattagtacaaaatattgatgcagaaagtaataatttattgggtagtttgtaattttaaaattatgttttaaaatggaccatgacatacttgccgtaagtaaagtatttctatttcttgcctttatatatcttctggcaaggac

SEQ ID NO: 7800 - DNA, 238 bp, synthetic construct; identical to SEQ ID NO: 7799
  misc_feature 1..238: note = promoter
  source 1..238: mol_type = other DNA

SEQ ID NO: 7801 - DNA, 238 bp, synthetic construct; identical to SEQ ID NO: 7799
  misc_feature 1..238: note = promoter
  source 1..238: mol_type = other DNA

SEQ ID NO: 7802 - DNA, 238 bp, synthetic construct
  misc_feature 1..238: note = promoter
  source 1..238: mol_type = other DNA
gagggcctatttcccatgagtccttcatatttgcatatacgatgcaagaatgttagagagataattagaattaatttgattataaacataaagatattagtacaaaatattgatgcagaaagtaataatttattgggtagtttgtaattttaaaattatgttttaaaatggaccatgacatacttgccgtaagtgaagtatttctatttcttgcctttatatatcttctggcaaggac

SEQ ID NO: 7803 - DNA, 238 bp, synthetic construct
  misc_feature 1..238: note = promoter
  source 1..238: mol_type = other DNA
gagggcctatttcccatgagtccttcatatttgcatatacgatgcaagaatgttagagagataattagaattaatttgattataaacataaagatattagtacaaaatattgatgcagaaagtaataatttattgggtagtttgtaattttaaaattatgttttaaaatggaccatgacatacttgccgtaagtgtagtatttctatttcttgcctttatatatcttctggcaaggac

SEQ ID NO: 7804 - DNA, 238 bp, synthetic construct; identical to SEQ ID NO: 7803
  misc_feature 1..238: note = promoter
  source 1..238: mol_type = other DNA

SEQ ID NO: 7805 - DNA, 238 bp, synthetic construct
  misc_feature 1..238: note = promoter
  source 1..238: mol_type = other DNA
gagggcctatttcccatgagtccttcatatttgcatatacgatgcaagaatgttagagagataattagaattaatttgattataaacataaagatattagtacaaaatattgatgcagaaagtaataatttattgggtagtttgtaattttaaaattatgttttaaaatggaccatgacatacttgccgtaagtgtaatatttctatttcttgcctttatatatcttctggcaaggac

SEQ ID NO: 7806 - DNA, 238 bp, synthetic construct
  misc_feature 1..238: note = promoter
  source 1..238: mol_type = other DNA
gagggcctatttcccatgagtccttcatatttgcatatacgatgcaagaatgttagagagataattagaattaatttgattataaacataaagatattagtacaaaatattgatgcagaaagtaataatttattgggtagtttgtaattttaaaattatgttttaaaatggaccatgacatacttgccgtaagtgtaaaatttctatttcttgcctttatatatcttctggcaaggac

SEQ ID NO: 7807 - DNA, 238 bp, synthetic construct
  misc_feature 1..238: note = promoter
  source 1..238: mol_type = other DNA
gagggcctatttcccatgagtccttcatatttgcatatacgatgcaagaatgttagagagataattagaattaatttgattataaacataaagatattagtacaaaatattgatgcagaaagtaataatttattgggtagtttgtaattttaaaattatgttttaaaatggaccatgacatacttgccgtaagtgtaaagtttctatttcttgcctttatatatcttctggcaaggac

SEQ ID NO: 7808 - DNA, 238 bp, synthetic construct; identical to SEQ ID NO: 7807
  misc_feature 1..238: note = promoter
  source 1..238: mol_type = other DNA

SEQ ID NO: 7809 - DNA, 238 bp, synthetic construct
  misc_feature 1..238: note = promoter
  source 1..238: mol_type = other DNA
gagggcctatttcccatgagtccttcatatttgcatatacgatgcaagaatgttagagagataattagaattaatttgattataaacataaagatattagtacaaaatattgatgcagaaagtaataatttattgggtagtttgtaattttaaaattatgttttaaaatggaccatgacatacttgccgtaagtgtaaagtatctatttcttgcctttatatatcttctggcaaggac

SEQ ID NO: 7810 - DNA, 238 bp, synthetic construct; identical to SEQ ID NO: 7809
  misc_feature 1..238: note = promoter
  source 1..238: mol_type = other DNA

SEQ ID NO: 7811 - DNA, 238 bp, synthetic construct
  misc_feature 1..238: note = promoter
  source 1..238: mol_type = other DNA
gagggcctatttcccatgagtccttcatatttgcatatacgatgcaagaatgttagagagataattagaattaatttgattataaacataaagatattagtacaaaatattgatgcagaaagtaataatttattgggtagtttgtaattttaaaattatgttttaaaatggaccatgacatacttgccgtaagtgtaaagtatttatttcttgcctttatatatcttctggcaaggac

SEQ ID NO: 7812 - DNA, 238 bp, synthetic construct; identical to SEQ ID NO: 7811
  misc_feature 1..238: note = promoter
  source 1..238: mol_type = other DNA

SEQ ID NO: 7813 - DNA, 238 bp, synthetic construct
  misc_feature 1..238: note = promoter
  source 1..238: mol_type = other DNA
gagggcctatttcccatgagtccttcatatttgcatatacgatgcaagaatgttagagagataattagaattaatttgattataaacataaagatattagtacaaaatattgatgcagaaagtaataatttattgggtagtttgtaattttaaaattatgttttaaaatggaccatgacatacttgccgtaagtgtaaagtatttctttcttgcctttatatatcttctggcaaggac

SEQ ID NO: 7814 - DNA, 238 bp, synthetic construct; identical to SEQ ID NO: 7813
  misc_feature 1..238: note = promoter
  source 1..238: mol_type = other DNA

SEQ ID NO: 7815 - DNA, 238 bp, synthetic construct
  misc_feature 1..238: note = promoter
  source 1..238: mol_type = other DNA
gagggcctatttcccatgagtccttcatatttgcatatacgatgcaagaatgttagagagataattagaattaatttgattataaacataaagatattagtacaaaatattgatgcagaaagtaataatttattgggtagtttgtaattttaaaattatgttttaaaatggaccatgacatacttgccgtaagtgtaaagtatttctatcttgcctttatatatcttctggcaaggac

SEQ ID NO: 7816 - DNA, 238 bp, synthetic construct; identical to SEQ ID NO: 7815
  misc_feature 1..238: note = promoter
  source 1..238: mol_type = other DNA

SEQ ID NO: 7817 - DNA, 238 bp, synthetic construct
  misc_feature 1..238: note = promoter
  source 1..238: mol_type = other DNA
gagggcctatttcccatgagtccttcatatttgcatatacgatgcaagaatgttagagagataattagaattaatttgattataaacataaagatattagtacaaaatattgatgcagaaagtaataatttattgggtagtttgtaattttaaaattatgttttaaaatggaccatgacatacttgccgtaagtgtaaagtatttctattttgcctttatatatcttctggcaaggac

SEQ ID NO: 7818 - DNA, 238 bp, synthetic construct; identical to SEQ ID NO: 7817
  misc_feature 1..238: note = promoter
  source 1..238: mol_type = other DNA

SEQ ID NO: 7819 - DNA, 238 bp, synthetic construct
  misc_feature 1..238: note = promoter
  source 1..238: mol_type = other DNA
gagggcctatttcccatgagtccttcatatttgcatatacgatgcaagaatgttagagagataattagaattaatttgattataaacataaagatattagtacaaaatattgatgcagaaagtaataatttattgggtagtttgtaattttaaaattatgttttaaaatggaccatgacatacttgccgtaagtgtaaagtatttctatttcgcctttatatatcttctggcaaggac

SEQ ID NO: 7820 - DNA, 238 bp, synthetic construct
  misc_feature 1..238: note = promoter
  source 1..238: mol_type = other DNA
gagggcctatttcccatgagtccttcatatttgcatatacgatgcaagaatgttagagagataattagaattaatttgattataaacataaagatattagtacaaaatattgatgcagaaagtaataatttattgggtagtttgtaattttaaaattatgttttaaaatggaccatgacatacttgccgtaagtgtaaagtatttctatttctcctttatatatcttctggcaaggac

SEQ ID NO: 7821 - DNA, 238 bp, synthetic construct
  misc_feature 1..238: note = promoter
  source 1..238: mol_type = other DNA
gagggcctatttcccatgagtccttcatatttgcatatacgatgcaagaatgttagagagataattagaattaatttgattataaacataaagatattagtacaaaatattgatgcagaaagtaataatttattgggtagtttgtaattttaaaattatgttttaaaatggaccatgacatacttgccgtaagtgtaaagtatttctatttcttctttatatatcttctggcaaggac

SEQ ID NO: 7822 - DNA, 238 bp, synthetic construct
  misc_feature 1..238: note = promoter
  source 1..238: mol_type = other DNA
gagggcctatttcccatgagtccttcatatttgcatatacgatgcaagaatgttagagagataattagaattaatttgattataaacataaagatattagtacaaaatattgatgcagaaagtaataatttattgggtagtttgtaattttaaaattatgttttaaaatggaccatgacatacttgccgtaagtgtaaagtatttctatttcttgtttatatatcttctggcaaggac

SEQ ID NO: 7823 - DNA, 238 bp, synthetic construct
  misc_feature 1..238: note = promoter
  source 1..238: mol_type = other DNA
gagggcctatttcccatgagtccttcatatttgcatatacgatgcaagaatgttagagagataattagaattaatttgattataaacataaagatattagtacaaaatattgatgcagaaagtaataatttattgggtagtttgtaattttaaaattatgttttaaaatggaccatgacatacttgccgtaagtgtaaagtatttctatttcttgcttatatatcttctggcaaggac

SEQ ID NO: 7824 - DNA, 238 bp, synthetic construct
  misc_feature 1..238: note = promoter
  source 1..238: mol_type = other DNA
gagggcctatttcccatgagtccttcatatttgcatatacgatgcaagaatgttagagagataattagaattaatttgattataaacataaagatattagtacaaaatattgatgcagaaagtaataatttattgggtagtttgtaattttaaaattatgttttaaaatggaccatgacatacttgccgtaagtgtaaagtatttctatttcttgcctatatatcttctggcaaggac

SEQ ID NO: 7825 - DNA, 238 bp, synthetic construct; identical to SEQ ID NO: 7824
  misc_feature 1..238: note = promoter
  source 1..238: mol_type = other DNA

SEQ ID NO: 7826 - DNA, 238 bp, synthetic construct
  misc_feature 1..238: note = promoter
  source 1..238: mol_type = other DNA
gagggcctatttcccatgagtccttcatatttgcatatacgatgcaagaatgttagagagataattagaattaatttgattataaacataaagatattagtacaaaatattgatgcagaaagtaataatttattgggtagtttgtaattttaaaattatgttttaaaatggaccatgacatacttgccgtaagtgtaaagtatttctatttcttgcctttatatcttctggcaaggac

SEQ ID NO: 7827 - DNA, 238 bp, synthetic construct; identical to SEQ ID NO: 7826
  misc_feature 1..238: note = promoter
  source 1..238: mol_type = other DNA

SEQ ID NO: 7828 - DNA, 238 bp, synthetic construct; identical to SEQ ID NO: 7826
  misc_feature 1..238: note = promoter
  source 1..238: mol_type = other DNA

SEQ ID NO: 7829 - DNA, 238 bp, synthetic construct; identical to SEQ ID NO: 7826
  misc_feature 1..238: note = promoter
  source 1..238: mol_type = other DNA

SEQ ID NO: 7830 - DNA, 238 bp, synthetic construct; identical to SEQ ID NO: 7826
  misc_feature 1..238: note = promoter
  source 1..238: mol_type = other DNA

SEQ ID NO: 7831 - DNA, 238 bp, synthetic construct; identical to SEQ ID NO: 7826
  misc_feature 1..238: note = promoter
  source 1..238: mol_type = other DNA

SEQ ID NO: 7832 - DNA, 238 bp, synthetic construct
  misc_feature 1..238: note = promoter
  source 1..238: mol_type = other DNA
gagggcctatttcccatgagtccttcatatttgcatatacgatgcaagaatgttagagagataattagaattaatttgattataaacataaagatattagtacaaaatattgatgcagaaagtaataatttattgggtagtttgtaattttaaaattatgttttaaaatggaccatgacatacttgccgtaagtgtaaagtatttctatttcttgcctttatatattctggcaaggac

SEQ ID NO: 7833 - DNA, 238 bp, synthetic construct; identical to SEQ ID NO: 7832
  misc_feature 1..238: note = promoter
  source 1..238: mol_type = other DNA

SEQ ID NO: 7834 - DNA, 238 bp, synthetic construct
  misc_feature 1..238: note = promoter
  source 1..238: mol_type = other DNA
gagggcctatttcccatgagtccttcatatttgcatatacgatgcaagaatgttagagagataattagaattaatttgattataaacataaagatattagtacaaaatattgatgcagaaagtaataatttattgggtagtttgtaattttaaaattatgttttaaaatggaccatgacatacttgccgtaagtgtaaagtatttctatttcttgcctttatatatcctggcaaggac

SEQ ID NO: 7835 - DNA, 238 bp, synthetic construct
  misc_feature 1..238: note = promoter
  source 1..238: mol_type = other DNA
gagggcctatttcccatgagtccttcatatttgcatatacgatgcaagaatgttagagagataattagaattaatttgattataaacataaagatattagtacaaaatattgatgcagaaagtaataatttattgggtagtttgtaattttaaaattatgttttaaaatggaccatgacatacttgccgtaagtgtaaagtatttctatttcttgcctttatatatcttggcaaggac

SEQ ID NO: 7836 - DNA, 238 bp, synthetic construct; identical to SEQ ID NO: 7835
  misc_feature 1..238: note = promoter
  source 1..238: mol_type = other DNA

SEQ ID NO: 7837 - DNA, 238 bp, synthetic construct
  misc_feature 1..238: note = promoter
  source 1..238: mol_type = other DNA
gagggcctatttcccatgagtccttcatatttgcatatacgatgcaagaatgttagagagataattagaattaatttgattataaacataaagatattagtacaaaatattgatgcagaaagtaataatttattgggtagtttgtaattttaaaattatgttttaaaatggaccatgacatacttgccgtaagtgtaaagtatttctatttcttgcctttatatatcttcgcaaggac

SEQ ID NO: 7838 - DNA, 238 bp, synthetic construct
  misc_feature 1..238: note = promoter
  source 1..238: mol_type = other DNA
gagggcctatttcccatgagtccttcatatttgcatatacgatgcaagaatgttagagagataattagaattaatttgattataaacataaagatattagtacaaaatattgatgcagaaagtaataatttattgggtagtttgtaattttaaaattatgttttaaaatggaccatgacatacttgccgtaagtgtaaagtatttctatttcttgcctttatatatcttctcaaggac

SEQ ID NO: 7839 - DNA, 238 bp, synthetic construct
  misc_feature 1..238: note = promoter
  source 1..238: mol_type = other DNA
gagggcctatttcccatgagtccttcatatttgcatatacgatgcaagaatgttagagagataattagaattaatttgattataaacataaagatattagtacaaaatattgatgcagaaagtaataatttattgggtagtttgtaattttaaaattatgttttaaaatggaccatgacatacttgccgtaagtgtaaagtatttctatttcttgcctttatatatcttctgaaggac

SEQ ID NO: 7840 - DNA, 238 bp, synthetic construct
  misc_feature 1..238: note = promoter
  source 1..238: mol_type = other DNA
gagggcctatttcccatgagtccttcatatttgcatatacgatgcaagaatgttagagagataattagaattaatttgattataaacataaagatattagtacaaaatattgatgcagaaagtaataatttattgggtagtttgtaattttaaaattatgttttaaaatggaccatgacatacttgccgtaagtgtaaagtatttctatttcttgcctttatatatcttctggaggac

SEQ ID NO: 7841 - DNA, 238 bp, synthetic construct
  misc_feature 1..238: note = promoter
  source 1..238: mol_type = other DNA
gagggcctatttcccatgagtccttcatatttgcatatacgatgcaagaatgttagagagataattagaattaatttgattataaacataaagatattagtacaaaatattgatgcagaaagtaataatttattgggtagtttgtaattttaaaattatgttttaaaatggaccatgacatacttgccgtaagtgtaaagtatttctatttcttgcctttatatatcttctggcggac

SEQ ID NO: 7842 - DNA, 238 bp, synthetic construct
  misc_feature 1..238: note = promoter
  source 1..238: mol_type = other DNA
gagggcctatttcccatgagtccttcatatttgcatatacgatgcaagaatgttagagagataattagaattaatttgattataaacataaagatattagtacaaaatattgatgcagaaagtaataatttattgggtagtttgtaattttaaaattatgttttaaaatggaccatgacatacttgccgtaagtgtaaagtatttctatttcttgcctttatatatcttctggcagac

SEQ ID NO: 7843 - DNA, 238 bp, synthetic construct
  misc_feature 1..238: note = promoter
  source 1..238: mol_type = other DNA
gagggcctatttcccatgagtccttcatatttgcatatacgatgcaagaatgttagagagataattagaattaatttgattataaacataaagatattagtacaaaatattgatgcagaaagtaataatttattgggtagtttgtaattttaaaattatgttttaaaatggaccatgacatacttgccgtaagtgtaaagtatttctatttcttgcctttatatatcttctggcaaac

SEQ ID NO: 7844 - DNA, 238 bp, synthetic construct
  misc_feature 1..238: note = promoter
  source 1..238: mol_type = other DNA
gagggcctatttcccatgagtccttcatatttgcatatacgatgcaagaatgttagagagataattagaattaatttgattataaacataaagatattagtacaaaatattgatgcagaaagtaataatttattgggtagtttgtaattttaaaattatgttttaaaatggaccatgacatacttgccgtaagtgtaaagtatttctatttcttgcctttatatatcttctggcaagc

SEQ ID NO: 7845 - DNA, 238 bp, synthetic construct
  misc_feature 1..238: note = promoter
  source 1..238: mol_type = other DNA
gagggcctatttcccatgagtccttcatatttgcatatacgatgcaagaatgttagagagataattagaattaatttgattataaacataaagatattagtacaaaatattgatgcagaaagtaataatttattgggtagtttgtaattttaaaattatgttttaaaatggaccatgacatacttgccgtaagtgtaaagtatttctatttcttgcctttatatatcttctggcaagg

SEQ ID NO: 7846 - DNA, 239 bp, synthetic construct
  misc_feature 1..239: note = promoter
  source 1..239: mol_type = other DNA
gagggcctatttcccatgagtccttcatatttgcatatacgatgcaagaatgttagagagataattagaattaatttgattataaacataaagatattagtacaaaatattgatgcagaaagtaataatttattgggtagtttgtaattttaaaattatgttttaaaatggaccatgacatacttgccgtaagtgtaaagtatttctatttcttgcctttatatatcttctggcaagga

SEQ ID NO: 7847 - DNA, 230 bp, synthetic construct
  misc_feature 1..230: note = promoter
  source 1..230: mol_type = other DNA
ttcccatgagtccttcatatttgcatatacgatgcaagaatgttagagagataattagaattaatttgattataaacataaagatattagtacaaaatattgatgcagaaagtaataatttattgggtagtttgtaattttaaaattatgttttaaaatggaccatgacatacttgccgtaagtgtaaagtatttctatttcttgcctttatatatcttctggcaaggac

SEQ ID NO: 7848 - DNA, 230 bp, synthetic construct
  misc_feature 1..230: note = promoter
  source 1..230: mol_type = other DNA
gtcccatgagtccttcatatttgcatatacgatgcaagaatgttagagagataattagaattaatttgattataaacataaagatattagtacaaaatattgatgcagaaagtaataatttattgggtagtttgtaattttaaaattatgttttaaaatggaccatgacatacttgccgtaagtgtaaagtatttctatttcttgcctttatatatcttctggcaaggac

SEQ ID NO: 7849 - DNA, 230 bp, synthetic construct
  misc_feature 1..230: note = promoter
  source 1..230: mol_type = other DNA
gacccatgagtccttcatatttgcatatacgatgcaagaatgttagagagataattagaattaatttgattataaacataaagatattagtacaaaatattgatgcagaaagtaataatttattgggtagtttgtaattttaaaattatgttttaaaatggaccatgacatacttgccgtaagtgtaaagtatttctatttcttgcctttatatatcttctggcaaggac

SEQ ID NO: 7850 - DNA, 230 bp, synthetic construct
  misc_feature 1..230: note = promoter
  source 1..230: mol_type = other DNA
gagccatgagtccttcatatttgcatatacgatgcaagaatgttagagagataattagaattaatttgattataaacataaagatattagtacaaaatattgatgcagaaagtaataatttattgggtagtttgtaattttaaaattatgttttaaaatggaccatgacatacttgccgtaagtgtaaagtatttctatttcttgcctttatatatcttctggcaaggac

SEQ ID NO: 7851 - DNA, 230 bp, synthetic construct
  misc_feature 1..230: note = promoter
  source 1..230: mol_type = other DNA
gaggcatgagtccttcatatttgcatatacgatgcaagaatgttagagagataattagaattaatttgattataaacataaagatattagtacaaaatattgatgcagaaagtaataatttattgggtagtttgtaattttaaaattatgttttaaaatggaccatgacatacttgccgtaagtgtaaagtatttctatttcttgcctttatatatcttctggcaaggac

SEQ ID NO: 7852 - DNA, 230 bp, synthetic construct
  misc_feature 1..230: note = promoter
  source 1..230: mol_type = other DNA
gagggatgagtccttcatatttgcatatacgatgcaagaatgttagagagataattagaattaatttgattataaacataaagatattagtacaaaatattgatgcagaaagtaataatttattgggtagtttgtaattttaaaattatgttttaaaatggaccatgacatacttgccgtaagtgtaaagtatttctatttcttgcctttatatatcttctggcaaggac

SEQ ID NO: 7853 - DNA, 230 bp, synthetic construct
  misc_feature 1..230: note = promoter
  source 1..230: mol_type = other DNA
gagggctgagtccttcatatttgcatatacgatgcaagaatgttagagagataattagaattaatttgattataaacataaagatattagtacaaaatattgatgcagaaagtaataatttattgggtagtttgtaattttaaaattatgttttaaaatggaccatgacatacttgccgtaagtgtaaagtatttctatttcttgcctttatatatcttctggcaaggac

SEQ ID NO: 7854 - DNA, 230 bp, synthetic construct
  misc_feature 1..230: note = promoter
  source 1..230: mol_type = other DNA
gagggccgagtccttcatatttgcatatacgatgcaagaatgttagagagataattagaattaatttgattataaacataaagatattagtacaaaatattgatgcagaaagtaataatttattgggtagtttgtaattttaaaattatgttttaaaatggaccatgacatacttgccgtaagtgtaaagtatttctatttcttgcctttatatatcttctggcaaggac

SEQ ID NO: 7855 - DNA, 230 bp, synthetic construct
  misc_feature 1..230: note = promoter
  source 1..230: mol_type = other DNA
gagggcctagtccttcatatttgcatatacgatgcaagaatgttagagagataattagaattaatttgattataaacataaagatattagtacaaaatattgatgcagaaagtaataatttattgggtagtttgtaattttaaaattatgttttaaaatggaccatgacatacttgccgtaagtgtaaagtatttctatttcttgcctttatatatcttctggcaaggac

SEQ ID NO: 7856 - DNA, 230 bp, synthetic construct; identical to SEQ ID NO: 7855
  misc_feature 1..230: note = promoter
  source 1..230: mol_type = other DNA

SEQ ID NO: 7857 - DNA, 230 bp, synthetic construct
  misc_feature 1..230: note = promoter
  source 1..230: mol_type = other DNA
gagggcctattccttcatatttgcatatacgatgcaagaatgttagagagataattagaattaatttgattataaacataaagatattagtacaaaatattgatgcagaaagtaataatttattgggtagtttgtaattttaaaattatgttttaaaatggaccatgacatacttgccgtaagtgtaaagtatttctatttcttgcctttatatatcttctggcaaggac

SEQ ID NO: 7858 - DNA, 230 bp, synthetic construct; identical to SEQ ID NO: 7857
  misc_feature 1..230: note = promoter
  source 1..230: mol_type = other DNA

SEQ ID NO: 7859 - DNA, 230 bp, synthetic construct
  misc_feature 1..230: note = promoter
  source 1..230: mol_type = other DNA
gagggcctatttcttcatatttgcatatacgatgcaagaatgttagagagataattagaattaatttgattataaacataaagatattagtacaaaatattgatgcagaaagtaataatttattgggtagtttgtaattttaaaattatgttttaaaatggaccatgacatacttgccgtaagtgtaaagtatttctatttcttgcctttatatatcttctggcaaggac

SEQ ID NO: 7860 - DNA, 230 bp, synthetic construct; identical to SEQ ID NO: 7859
  misc_feature 1..230: note = promoter
  source 1..230: mol_type = other DNA

SEQ ID NO: 7861 - DNA, 230 bp, synthetic construct
  misc_feature 1..230: note = promoter
  source 1..230: mol_type = other DNA
gagggcctatttcctcatatttgcatatacgatgcaagaatgttagagagataattagaattaatttgattataaacataaagatattagtacaaaatattgatgcagaaagtaataatttattgggtagtttgtaattttaaaattatgttttaaaatggaccatgacatacttgccgtaagtgtaaagtatttctatttcttgcctttatatatcttctggcaaggac

SEQ ID NO: 7862 - DNA, 230 bp, synthetic construct
  misc_feature 1..230: note = promoter
  source 1..230: mol_type = other DNA
gagggcctatttccccatatttgcatatacgatgcaagaatgttagagagataattagaattaatttgattataaacataaagatattagtacaaaatattgatgcagaaagtaataatttattgggtagtttgtaattttaaaattatgttttaaaatggaccatgacatacttgccgtaagtgtaaagtatttctatttcttgcctttatatatcttctggcaaggac

SEQ ID NO: 7863 - DNA, 230 bp, synthetic construct
  misc_feature 1..230: note = promoter
  source 1..230: mol_type = other DNA
gagggcctatttcccaatatttgcatatacgatgcaagaatgttagagagataattagaattaatttgattataaacataaagatattagtacaaaatattgatgcagaaagtaataatttattgggtagtttgtaattttaaaattatgttttaaaatggaccatgacatacttgccgtaagtgtaaagtatttctatttcttgcctttatatatcttctggcaaggac

SEQ ID NO: 7864 - DNA, 230 bp, synthetic construct
  misc_feature 1..230: note = promoter
  source 1..230: mol_type = other DNA
gagggcctatttcccattatttgcatatacgatgcaagaatgttagagagataattagaattaatttgattataaacataaagatattagtacaaaatattgatgcagaaagtaataatttattgggtagtttgtaattttaaaattatgttttaaaatggaccatgacatacttgccgtaagtgtaaagtatttctatttcttgcctttatatatcttctggcaaggac

SEQ ID NO: 7865 - DNA, 230 bp, synthetic construct
  misc_feature 1..230: note = promoter
  source 1..230: mol_type = other DNA
gagggcctatttcccatgatttgcatatacgatgcaagaatgttagagagataattagaattaatttgattataaacataaagatattagtacaaaatattgatgcagaaagtaataatttattgggtagtttgtaattttaaaattatgttttaaaatggaccatgacatacttgccgtaagtgtaaagtatttctatttcttgcctttatatatcttctggcaaggac

SEQ ID NO: 7866 - DNA, 230 bp, synthetic construct; identical to SEQ ID NO: 7865
  misc_feature 1..230: note = promoter
  source 1..230: mol_type = other DNA

SEQ ID NO: 7867 - DNA, 230 bp, synthetic construct
  misc_feature 1..230: note = promoter
  source 1..230: mol_type = other DNA
gagggcctatttcccatgagttgcatatacgatgcaagaatgttagagagataattagaattaatttgattataaacataaagatattagtacaaaatattgatgcagaaagtaataatttattgggtagtttgtaattttaaaattatgttttaaaatggaccatgacatacttgccgtaagtgtaaagtatttctatttcttgcctttatatatcttctggcaaggac

SEQ ID NO: 7868 - DNA, 230 bp, synthetic construct; identical to SEQ ID NO: 7867
  misc_feature 1..230: note = promoter
  source 1..230: mol_type = other DNA

SEQ ID NO: 7869 - DNA, 230 bp, synthetic construct
  misc_feature 1..230: note = promoter
  source 1..230: mol_type = other DNA
gagggcctatttcccatgagtcgcatatacgatgcaagaatgttagagagataattagaattaatttgattataaacataaagatattagtacaaaatattgatgcagaaagtaataatttattgggtagtttgtaattttaaaattatgttttaaaatggaccatgacatacttgccgtaagtgtaaagtatttctatttcttgcctttatatatcttctggcaaggac

SEQ ID NO: 7870 - DNA, 230 bp, synthetic construct
  misc_feature 1..230: note = promoter
  source 1..230: mol_type = other DNA
gagggcctatttcccatgagtcccatatacgatgcaagaatgttagagagataattagaattaatttgattataaacataaagatattagtacaaaatattgatgcagaaagtaataatttattgggtagtttgtaattttaaaattatgttttaaaatggaccatgacatacttgccgtaagtgtaaagtatttctatttcttgcctttatatatcttctggcaaggac

SEQ ID NO: 7871 - DNA, 230 bp, synthetic construct
  misc_feature 1..230: note = promoter
  source 1..230: mol_type = other DNA
gagggcctatttcccatgagtcctatatacgatgcaagaatgttagagagataattagaattaatttgattataaacataaagatattagtacaaaatattgatgcagaaagtaataatttattgggtagtttgtaattttaaaattatgttttaaaatggaccatgacatacttgccgtaagtgtaaagtatttctatttcttgcctttatatatcttctggcaaggac

SEQ ID NO: 7872 - DNA, 230 bp, synthetic construct
  misc_feature 1..230: note = promoter
  source 1..230: mol_type = other DNA
gagggcctatttcccatgagtcctttatacgatgcaagaatgttagagagataattagaattaatttgattataaacataaagatattagtacaaaatattgatgcagaaagtaataatttattgggtagtttgtaattttaaaattatgttttaaaatggaccatgacatacttgccgtaagtgtaaagtatttctatttcttgcctttatatatcttctggcaaggac

SEQ ID NO: 7873 - DNA, 230 bp, synthetic construct
  misc_feature 1..230: note = promoter
  source 1..230: mol_type = other DNA
gagggcctatttcccatgagtccttcatacgatgcaagaatgttagagagataattagaattaatttgattataaacataaagatattagtacaaaatattgatgcagaaagtaataatttattgggtagtttgtaattttaaaattatgttttaaaatggaccatgacatacttgccgtaagtgtaaagtatttctatttcttgcctttatatatcttctggcaaggac

SEQ ID NO: 7874 - DNA, 230 bp, synthetic construct; identical to SEQ ID NO: 7873
  misc_feature 1..230: note = promoter
  source 1..230: mol_type = other DNA

SEQ ID NO: 7875 - DNA, 230 bp, synthetic construct; identical to SEQ ID NO: 7873
  misc_feature 1..230: note = promoter
  source 1..230: mol_type = other DNA

SEQ ID NO: 7876 - DNA, 230 bp, synthetic construct; identical to SEQ ID NO: 7873
  misc_feature 1..230: note = promoter
  source 1..230: mol_type = other DNA

SEQ ID NO: 7877 - DNA, 230 bp, synthetic construct
  misc_feature 1..230: note = promoter
  source 1..230: mol_type = other DNA
gagggcctatttcccatgagtccttcatatgatgcaagaatgttagagagataattagaattaatttgattataaacataaagatattagtacaaaatattgatgcagaaagtaataatttattgggtagtttgtaattttaaaattatgttttaaaatggaccatgacatacttgccgtaagtgtaaagtatttctatttcttgcctttatatatcttctggcaaggac

SEQ ID NO: 7878 - DNA, 230 bp, synthetic construct
  misc_feature 1..230: note = promoter
  source 1..230: mol_type = other DNA
gagggcctatttcccatgagtccttcatattatgcaagaatgttagagagataattagaattaatttgattataaacataaagatattagtacaaaatattgatgcagaaagtaataatttattgggtagtttgtaattttaaaattatgttttaaaatggaccatgacatacttgccgtaagtgtaaagtatttctatttcttgcctttatatatcttctggcaaggac

SEQ ID NO: 7879 - DNA, 230 bp, synthetic construct
  misc_feature 1..230: note = promoter
  source 1..230: mol_type = other DNA
gagggcctatttcccatgagtccttcatattttgcaagaatgttagagagataattagaattaatttgattataaacataaagatattagtacaaaatattgatgcagaaagtaataatttattgggtagtttgtaattttaaaattatgttttaaaatggaccatgacatacttgccgtaagtgtaaagtatttctatttcttgcctttatatatcttctggcaaggac

SEQ ID NO: 7880 - DNA, 230 bp, synthetic construct
  misc_feature 1..230: note = promoter
  source 1..230: mol_type = other DNA
gagggcctatttcccatgagtccttcatatttggcaagaatgttagagagataattagaattaatttgattataaacataaagatattagtacaaaatattgatgcagaaagtaataatttattgggtagtttgtaattttaaaattatgttttaaaatggaccatgacatacttgccgtaagtgtaaagtatttctatttcttgcctttatatatcttctggcaaggac

SEQ ID NO: 7881 - DNA, 230 bp, synthetic construct
  misc_feature 1..230: note = promoter
  source 1..230: mol_type = other DNA
gagggcctatttcccatgagtccttcatatttgccaagaatgttagagagataattagaattaatttgattataaacataaagatattagtacaaaatattgatgcagaaagtaataatttattgggtagtttgtaattttaaaattatgttttaaaatggaccatgacatacttgccgtaagtgtaaagtatttctatttcttgcctttatatatcttctggcaaggac

SEQ ID NO: 7882 - DNA, 230 bp, synthetic construct
  misc_feature 1..230: note = promoter
  source 1..230: mol_type = other DNA
gagggcctatttcccatgagtccttcatatttgcaaagaatgttagagagataattagaattaatttgattataaacataaagatattagtacaaaatattgatgcagaaagtaataatttattgggtagtttgtaattttaaaattatgttttaaaatggaccatgacatacttgccgtaagtgtaaagtatttctatttcttgcctttatatatcttctggcaaggac

SEQ ID NO: 7883 - DNA, 230 bp, synthetic construct
  misc_feature 1..230: note = promoter
  source 1..230: mol_type = other DNA
gagggcctatttcccatgagtccttcatatttgcatagaatgttagagagataattagaattaatttgattataaacataaagatattagtacaaaatattgatgcagaaagtaataatttattgggtagtttgtaattttaaaattatgttttaaaatggaccatgacatacttgccgtaagtgtaaagtatttctatttcttgcctttatatatcttctggcaaggac

SEQ ID NO: 7884 - DNA, 230 bp, synthetic construct; identical to SEQ ID NO: 7883
  misc_feature 1..230: note = promoter
  source 1..230: mol_type = other DNA

SEQ ID NO: 7885 - DNA, 230 bp, synthetic construct
  misc_feature 1..230: note = promoter
  source 1..230: mol_type = other DNA
gagggcctatttcccatgagtccttcatatttgcatataatgttagagagataattagaattaatttgattataaacataaagatattagtacaaaatattgatgcagaaagtaataatttattgggtagtttgtaattttaaaattatgttttaaaatggaccatgacatacttgccgtaagtgtaaagtatttctatttcttgcctttatatatcttctggcaaggac

SEQ ID NO: 7886 - DNA, 230 bp, synthetic construct; identical to SEQ ID NO: 7885
  misc_feature 1..230: note = promoter
  source 1..230: mol_type = other DNA

SEQ ID NO: 7887 - DNA, 230 bp, synthetic construct
  misc_feature 1..230: note = promoter
  source 1..230: mol_type = other DNA
gagggcctatttcccatgagtccttcatatttgcatatactgttagagagataattagaattaatttgattataaacataaagatattagtacaaaatattgatgcagaaagtaataatttattgggtagtttgtaattttaaaattatgttttaaaatggaccatgacatacttgccgtaagtgtaaagtatttctatttcttgcctttatatatcttctggcaaggac

SEQ ID NO: 7888 - DNA, 230 bp, synthetic construct
  misc_feature 1..230: note = promoter
  source 1..230: mol_type = other DNA
gagggcctatttcccatgagtccttcatatttgcatatacggttagagagataattagaattaatttgattataaacataaagatattagtacaaaatattgatgcagaaagtaataatttattgggtagtttgtaattttaaaattatgttttaaaatggaccatgacatacttgccgtaagtgtaaagtatttctatttcttgcctttatatatcttctggcaaggac

SEQ ID NO: 7889 - DNA, 230 bp, synthetic construct
  misc_feature 1..230: note = promoter
  source 1..230: mol_type = other DNA
gagggcctatttcccatgagtccttcatatttgcatatacgattagagagataattagaattaatttgattataaacataaagatattagtacaaaatattgatgcagaaagtaataatttattgggtagtttgtaattttaaaattatgttttaaaatggaccatgacatacttgccgtaagtgtaaagtatttctatttcttgcctttatatatcttctggcaaggac

SEQ ID NO: 7890 - DNA, 230 bp, synthetic construct; identical to SEQ ID NO: 7889
  misc_feature 1..230: note = promoter
  source 1..230: mol_type = other DNA

SEQ ID NO: 7891 - DNA, 230 bp, synthetic construct
  misc_feature 1..230: note = promoter
  source 1..230: mol_type = other DNA
gagggcctatttcccatgagtccttcatatttgcatatacgatgagagagataattagaattaatttgattataaacataaagatattagtacaaaatattgatgcagaaagtaataatttattgggtagtttgtaattttaaaattatgttttaaaatggaccatgacatacttgccgtaagtgtaaagtatttctatttcttgcctttatatatcttctggcaaggac

SEQ ID NO: 7892 - DNA, 230 bp, synthetic construct
  misc_feature 1..230: note = promoter
  source 1..230: mol_type = other DNA
gagggcctatttcccatgagtccttcatatttgcatatacgatgcgagagataattagaattaatttgattataaacataaagatattagtacaaaatattgatgcagaaagtaataatttattgggtagtttgtaattttaaaattatgttttaaaatggaccatgacatacttgccgtaagtgtaaagtatttctatttcttgcctttatatatcttctggcaaggac

SEQ ID NO: 7893 - DNA, 230 bp, synthetic construct
  misc_feature 1..230: note = promoter
  source 1..230: mol_type = other DNA
gagggcctatttcccatgagtccttcatatttgcatatacgatgcaagagataattagaattaatttgattataaacataaagatattagtacaaaatattgatgcagaaagtaataatttattgggtagtttgtaattttaaaattatgttttaaaatggaccatgacatacttgccgtaagtgtaaagtatttctatttcttgcctttatatatcttctggcaaggac

SEQ ID NO: 7894 - DNA, 230 bp, synthetic construct; identical to SEQ ID NO: 7893
  misc_feature 1..230: note = promoter
  source 1..230: mol_type = other DNA

SEQ ID NO: 7895 - DNA, 230 bp, synthetic construct; identical to SEQ ID NO: 7893
  misc_feature 1..230: note = promoter
  source 1..230: mol_type = other DNA

SEQ ID NO: 7896 - DNA, 230 bp, synthetic construct; identical to SEQ ID NO: 7893
  misc_feature 1..230: note = promoter
  source 1..230: mol_type = other DNA

SEQ ID NO: 7897 - DNA, 230 bp, synthetic construct
  misc_feature 1..230: note = promoter
  source 1..230: mol_type = other DNA
gagggcctatttcccatgagtccttcatatttgcatatacgatgcaagaaataattagaattaatttgattataaacataaagatattagtacaaaatattgatgcagaaagtaataatttattgggtagtttgtaattttaaaattatgttttaaaatggaccatgacatacttgccgtaagtgtaaagtatttctatttcttgcctttatatatcttctggcaaggac

SEQ ID NO: 7898 - DNA, 230 bp, synthetic construct
  misc_feature 1..230: note = promoter
  source 1..230: mol_type = other DNA
gagggcctatttcccatgagtccttcatatttgcatatacgatgcaagaattaattagaattaatttgattataaacataaagatattagtacaaaatattgatgcagaaagtaataatttattgggtagtttgtaattttaaaattatgttttaaaatggaccatgacatacttgccgtaagtgtaaagtatttctatttcttgcctttatatatcttctggcaaggac

SEQ ID NO: 7899 - DNA, 230 bp, synthetic construct
  misc_feature 1..230: note = promoter
  source 1..230: mol_type = other DNA
gagggcctatttcccatgagtccttcatatttgcatatacgatgcaagaatgaattagaattaatttgattataaacataaagatattagtacaaaatattgatgcagaaagtaataatttattgggtagtttgtaattttaaaattatgttttaaaatggaccatgacatacttgccgtaagtgtaaagtatttctatttcttgcctttatatatcttctggcaaggac

SEQ ID NO: 7900 - DNA, 230 bp, synthetic construct
  misc_feature 1..230: note = promoter
  source 1..230: mol_type = other DNA
gagggcctatttcccatgagtccttcatatttgcatatacgatgcaagaatgtattagaattaatttgattataaacataaagatattagtacaaaatattgatgcagaaagtaataatttattgggtagtttgtaattttaaaattatgttttaaaatggaccatgacatacttgccgtaagtgtaaagtatttctatttcttgcctttatatatcttctggcaaggac

SEQ ID NO: 7901 - DNA, 230 bp, synthetic construct
  misc_feature 1..230: note = promoter
  source 1..230: mol_type = other DNA
gagggcctatttcccatgagtccttcatatttgcatatacgatgcaagaatgttttagaattaatttgattataaacataaagatattagtacaaaatattgatgcagaaagtaataatttattgggtagtttgtaattttaaaattatgttttaaaatggaccatgacatacttgccgtaagtgtaaagtatttctatttcttgcctttatatatcttctggcaaggac

SEQ ID NO: 7902 - DNA, 230 bp, synthetic construct
  misc_feature 1..230: note = promoter
  source 1..230: mol_type = other DNA
gagggcctatttcccatgagtccttcatatttgcatatacgatgcaagaatgttatagaattaatttgattataaacataaagatattagtacaaaatattgatgcagaaagtaataatttattgggtagtttgtaattttaaaattatgttttaaaatggaccatgacatacttgccgtaagtgtaaagtatttctatttcttgcctttatatatcttctggcaaggac

SEQ ID NO: 7903 - DNA, 230 bp, synthetic construct
  misc_feature 1..230: note = promoter
  source 1..230: mol_type = other DNA
gagggcctatttcccatgagtccttcatatttgcatatacgatgcaagaatgttagagaattaatttgattataaacataaagatattagtacaaaatattgatgcagaaagtaataatttattgggtagtttgtaattttaaaattatgttttaaaatggaccatgacatacttgccgtaagtgtaaagtatttctatttcttgcctttatatatcttctggcaaggac

SEQ ID NO: 7904 - DNA, 230 bp, synthetic construct; identical to SEQ ID NO: 7903
  misc_feature 1..230: note = promoter
  source 1..230: mol_type = other DNA

SEQ ID NO: 7905 - DNA, 230 bp, synthetic construct; identical to SEQ ID NO: 7903
  misc_feature 1..230: note = promoter
  source 1..230: mol_type = other DNA

SEQ ID NO: 7906 - DNA, 230 bp, synthetic construct; identical to SEQ ID NO: 7903
  misc_feature 1..230: note = promoter
  source 1..230: mol_type = other DNA

SEQ ID NO: 7907 - DNA, 230 bp, synthetic construct
  misc_feature 1..230: note = promoter
  source 1..230: mol_type = other DNA
gagggcctatttcccatgagtccttcatatttgcatatacgatgcaagaatgttagagagttaatttgattataaacataaagatattagtacaaaatattgatgcagaaagtaataatttattgggtagtttgtaattttaaaattatgttttaaaatggaccatgacatacttgccgtaagtgtaaagtatttctatttcttgcctttatatatcttctggcaaggac

SEQ ID NO: 7908 - DNA, 230 bp, synthetic construct
  misc_feature 1..230: note = promoter
  source 1..230: mol_type = other DNA
gagggcctatttcccatgagtccttcatatttgcatatacgatgcaagaatgttagagagataatttgattataaacataaagatattagtacaaaatattgatgcagaaagtaataatttattgggtagtttgtaattttaaaattatgttttaaaatggaccatgacatacttgccgtaagtgtaaagtatttctatttcttgcctttatatatcttctggcaaggac

SEQ ID NO: 7909 - DNA, 230 bp, synthetic construct; identical to SEQ ID NO: 7908
  misc_feature 1..230: note = promoter
  source 1..230: mol_type = other DNA

SEQ ID NO: 7910 - DNA, 230 bp, synthetic construct; identical to SEQ ID NO: 7908
  misc_feature 1..230: note = promoter
  source 1..230: mol_type = other DNA

SEQ ID NO: 7911 - DNA, 230 bp, synthetic construct; identical to SEQ ID NO: 7908
  misc_feature 1..230: note = promoter
  source 1..230: mol_type = other DNA

SEQ ID NO: 7912 - DNA, 230 bp, synthetic construct; identical to SEQ ID NO: 7908
  misc_feature 1..230: note = promoter
  source 1..230: mol_type = other DNA

SEQ ID NO: 7913 - DNA, 230 bp, synthetic construct; identical to SEQ ID NO: 7908
  misc_feature 1..230: note = promoter
  source 1..230: mol_type = other DNA

SEQ ID NO: 7914 - DNA, 230 bp, synthetic construct
  misc_feature 1..230: note = promoter
  source 1..230: mol_type = other DNA
gagggcctatttcccatgagtccttcatatttgcatatacgatgcaagaatgttagagagataattagattataaacataaagatattagtacaaaatattgatgcagaaagtaataatttattgggtagtttgtaattttaaaattatgttttaaaatggaccatgacatacttgccgtaagtgtaaagtatttctatttcttgcctttatatatcttctggcaaggac

SEQ ID NO: 7915 - DNA, 230 bp, synthetic construct; identical to SEQ ID NO: 7914
  misc_feature 1..230: note = promoter
  source 1..230: mol_type = other DNA

SEQ ID NO: 7916 - DNA, 230 bp, synthetic construct; identical to SEQ ID NO: 7914
  misc_feature 1..230: note = promoter
  source 1..230: mol_type = other DNA

SEQ ID NO: 7917 - DNA, 230 bp, synthetic construct
  misc_feature 1..230: note = promoter
  source 1..230: mol_type = other DNA
gagggcctatttcccatgagtccttcatatttgcatatacgatgcaagaatgttagagagataattagaatataaacataaagatattagtacaaaatattgatgcagaaagtaataatttattgggtagtttgtaattttaaaattatgttttaaaatggaccatgacatacttgccgtaagtgtaaagtatttctatttcttgcctttatatatcttctggcaaggac

SEQ ID NO: 7918 - DNA, 230 bp, synthetic construct; identical to SEQ ID NO: 7917
  misc_feature 1..230: note = promoter
  source 1..230: mol_type = other DNA

SEQ ID NO: 7919 - DNA, 230 bp, synthetic construct
  misc_feature 1..230: note = promoter
  source 1..230: mol_type = other DNA
gagggcctatttcccatgagtccttcatatttgcatatacgatgcaagaatgttagagagataattagaatttaaacataaagatattagtacaaaatattgatgcagaaagtaataatttattgggtagtttgtaattttaaaattatgttttaaaatggaccatgacatacttgccgtaagtgtaaagtatttctatttcttgcctttatatatcttctggcaaggac

SEQ ID NO: 7920 - DNA, 230 bp, synthetic construct
  misc_feature 1..230: note = promoter
  source 1..230: mol_type = other DNA
gagggcctatttcccatgagtccttcatatttgcatatacgatgcaagaatgttagagagataattagaattaaaacataaagatattagtacaaaatattgatgcagaaagtaataatttattgggtagtttgtaattttaaaattatgttttaaaatggaccatgacatacttgccgtaagtgtaaagtatttctatttcttgcctttatatatcttctggcaaggac

SEQ ID NO: 7921 - DNA, 230 bp, synthetic construct; identical to SEQ ID NO: 7920
  misc_feature 1..230: note = promoter
  source 1..230: mol_type = other DNA

SEQ ID NO: 7922 - DNA, 230 bp, synthetic construct
  misc_feature 1..230: note = promoter
  source 1..230: mol_type = other DNA
gagggcctatttcccatgagtccttcatatttgcatatacgatgcaagaatgttagagagataattagaattaatacataaagatattagtacaaaatattgatgcagaaagtaataatttattgggtagtttgtaattttaaaattatgttttaaaatggaccatgacatacttgccgtaagtgtaaagtatttctatttcttgcctttatatatcttctggcaaggac

SEQ ID NO: 7923 - DNA, 230 bp, synthetic construct
  misc_feature 1..230: note = promoter
  source 1..230: mol_type = other DNA
gagggcctatttcccatgagtccttcatatttgcatatacgatgcaagaatgttagagagataattagaattaattcataaagatattagtacaaaatattgatgcagaaagtaataatttattgggtagtttgtaattttaaaattatgttttaaaatggaccatgacatacttgccgtaagtgtaaagtatttctatttcttgcctttatatatcttctggcaaggac

SEQ ID NO: 7924 - DNA, 230 bp, synthetic construct
  misc_feature 1..230: note = promoter
  source 1..230: mol_type = other DNA
gagggcctatttcccatgagtccttcatatttgcatatacgatgcaagaatgttagagagataattagaattaatttataaagatattagtacaaaatattgatgcagaaagtaataatttattgggtagtttgtaattttaaaattatgttttaaaatggaccatgacatacttgccgtaagtgtaaagtatttctatttcttgcctttatatatcttctggcaaggac

SEQ ID NO: 7925 - DNA, 230 bp, synthetic construct
  misc_feature 1..230: note = promoter
  source 1..230: mol_type = other DNA
gagggcctatttcccatgagtccttcatatttgcatatacgatgcaagaatgttagagagataattagaattaatttgtaaagatattagtacaaaatattgatgcagaaagtaataatttattgggtagtttgtaattttaaaattatgttttaaaatggaccatgacatacttgccgtaagtgtaaagtatttctatttcttgcctttatatatcttctggcaaggac

SEQ ID NO: 7926 - DNA, 230 bp, synthetic construct
  misc_feature 1..230: note = promoter
  source 1..230: mol_type = other DNA
gagggcctatttcccatgagtccttcatatttgcatatacgatgcaagaatgttagagagataattagaattaatttgaaaagatattagtacaaaatattgatgcagaaagtaataatttattgggtagtttgtaattttaaaattatgttttaaaatggaccatgacatacttgccgtaagtgtaaagtatttctatttcttgcctttatatatcttctggcaaggac

SEQ ID NO: 7927 - DNA, 230 bp, synthetic construct
  misc_feature 1..230: note = promoter
  source 1..230: mol_type = other DNA
gagggcctatttcccatgagtccttcatatttgcatatacgatgcaagaatgttagagagataattagaattaatttgataagatattagtacaaaatattgatgcagaaagtaataatttattgggtagtttgtaattttaaaattatgttttaaaatggaccatgacatacttgccgtaagtgtaaagtatttctatttcttgcctttatatatcttctggcaaggac

SEQ ID NO: 7928 - DNA, 230 bp, synthetic construct
  misc_feature 1..230: note = promoter
  source 1..230: mol_type = other DNA
gagggcctatttcccatgagtccttcatatttgcatatacgatgcaagaatgttagagagataattagaattaatttgattagatattagtacaaaatattgatgcagaaagtaataatttattgggtagtttgtaattttaaaattatgttttaaaatggaccatgacatacttgccgtaagtgtaaagtatttctatttcttgcctttatatatcttctggcaaggac

SEQ ID NO: 7929 - DNA, 230 bp, synthetic construct; identical to SEQ ID NO: 7928
  misc_feature 1..230: note = promoter
  source 1..230: mol_type = other DNA

SEQ ID NO: 7930 - DNA, 230 bp, synthetic construct
  misc_feature 1..230: note = promoter
  source 1..230: mol_type = other DNA
gagggcctatttcccatgagtccttcatatttgcatatacgatgcaagaatgttagagagataattagaattaatttgattatatattagtacaaaatattgatgcagaaagtaataatttattgggtagtttgtaattttaaaattatgttttaaaatggaccatgacatacttgccgtaagtgtaaagtatttctatttcttgcctttatatatcttctggcaaggac

SEQ ID NO: 7931 - DNA, 230 bp, synthetic construct; identical to SEQ ID NO: 7930
  misc_feature 1..230: note = promoter
  source 1..230: mol_type = other DNA

SEQ ID NO: 7932 - DNA, 230 bp, synthetic construct
  misc_feature 1..230: note = promoter
  source 1..230: mol_type = other DNA
gagggcctatttcccatgagtccttcatatttgcatatacgatgcaagaatgttagagagataattagaattaatttgattataaattagtacaaaatattgatgcagaaagtaataatttattgggtagtttgtaattttaaaattatgttttaaaatggaccatgacatacttgccgtaagtgtaaagtatttctatttcttgcctttatatatcttctggcaaggac

SEQ ID NO: 7933 - DNA, 230 bp, synthetic construct; identical to SEQ ID NO: 7932
  misc_feature 1..230: note = promoter
  source 1..230: mol_type = other DNA

SEQ ID NO: 7934 - DNA, 230 bp, synthetic construct
  misc_feature 1..230: note = promoter
  source 1..230: mol_type = other DNA
gagggcctatttcccatgagtccttcatatttgcatatacgatgcaagaatgttagagagataattagaattaatttgattataaactagtacaaaatattgatgcagaaagtaataatttattgggtagtttgtaattttaaaattatgttttaaaatggaccatgacatacttgccgtaagtgtaaagtatttctatttcttgcctttatatatcttctggcaaggac

SEQ ID NO: 7935 - DNA, 230 bp, synthetic construct
  misc_feature 1..230: note = promoter
  source 1..230: mol_type = other DNA
gagggcctatttcccatgagtccttcatatttgcatatacgatgcaagaatgttagagagataattagaattaatttgattataaacaagtacaaaatattgatgcagaaagtaataatttattgggtagtttgtaattttaaaattatgttttaaaatggaccatgacatacttgccgtaagtgtaaagtatttctatttcttgcctttatatatcttctggcaaggac

SEQ ID NO: 7936 - DNA, 230 bp, synthetic construct
  misc_feature 1..230: note = promoter
  source 1..230: mol_type = other DNA
gagggcctatttcccatgagtccttcatatttgcatatacgatgcaagaatgttagagagataattagaattaatttgattataaacatgtacaaaatattgatgcagaaagtaataatttattgggtagtttgtaattttaaaattatgttttaaaatggaccatgacatacttgccgtaagtgtaaagtatttctatttcttgcctttatatatcttctggcaaggac

SEQ ID NO: 7937 - DNA, 230 bp, synthetic construct
  misc_feature 1..230: note = promoter
  source 1..230: mol_type = other DNA
gagggcctatttcccatgagtccttcatatttgcatatacgatgcaagaatgttagagagataattagaattaatttgattataaacatatacaaaatattgatgcagaaagtaataatttattgggtagtttgtaattttaaaattatgttttaaaatggaccatgacatacttgccgtaagtgtaaagtatttctatttcttgcctttatatatcttctggcaaggac

SEQ ID NO: 7938 - DNA, 230 bp, synthetic construct
  misc_feature 1..230: note = promoter
  source 1..230: mol_type = other DNA
gagggcctatttcccatgagtccttcatatttgcatatacgatgcaagaatgttagagagataattagaattaatttgattataaacataaacaaaatattgatgcagaaagtaataatttattgggtagtttgtaattttaaaattatgttttaaaatggaccatgacatacttgccgtaagtgtaaagtatttctatttcttgcctttatatatcttctggcaaggac

SEQ ID NO: 7939 - DNA, 230 bp, synthetic construct; identical to SEQ ID NO: 7938
  misc_feature 1..230: note = promoter
  source 1..230: mol_type = other DNA

SEQ ID NO: 7940 - DNA, 230 bp, synthetic construct
  misc_feature 1..230: note = promoter
  source 1..230: mol_type = other DNA
gagggcctatttcccatgagtccttcatatttgcatatacgatgcaagaatgttagagagataattagaattaatttgattataaacataaagaaaatattgatgcagaaagtaataatttattgggtagtttgtaattttaaaattatgttttaaaatggaccatgacatacttgccgtaagtgtaaagtatttctatttcttgcctttatatatcttctggcaaggac

SEQ ID NO: 7941 - DNA, 230 bp, synthetic construct; identical to SEQ ID NO: 7940
  misc_feature 1..230: note = promoter
  source 1..230: mol_type = other DNA

SEQ ID NO: 7942 - DNA, 230 bp, synthetic construct
  misc_feature 1..230: note = promoter
  source 1..230: mol_type = other DNA
gagggcctatttcccatgagtccttcatatttgcatatacgatgcaagaatgttagagagataattagaattaatttgattataaacataaagataatattgatgcagaaagtaataatttattgggtagtttgtaattttaaaattatgttttaaaatggaccatgacatacttgccgtaagtgtaaagtatttctatttcttgcctttatatatcttctggcaaggac

SEQ ID NO: 7943 - DNA, 230 bp, synthetic construct; identical to SEQ ID NO: 7942
  misc_feature 1..230: note = promoter
  source 1..230: mol_type = other DNA

SEQ ID NO: 7944 - DNA, 230 bp, synthetic construct
  misc_feature 1..230: note = promoter
  source 1..230: mol_type = other DNA
gagggcctatttcccatgagtccttcatatttgcatatacgatgcaagaatgttagagagataattagaattaatttgattataaacataaagatattattgatgcagaaagtaataatttattgggtagtttgtaattttaaaattatgttttaaaatggaccatgacatacttgccgtaagtgtaaagtatttctatttcttgcctttatatatcttctggcaaggac

SEQ ID NO: 7945 - DNA, 230 bp, synthetic construct; identical to SEQ ID NO: 7944
  misc_feature 1..230: note = promoter
  source 1..230: mol_type = other DNA

SEQ ID NO: 7946 - DNA, 230 bp, synthetic construct; identical to SEQ ID NO: 7944
  misc_feature 1..230: note = promoter
  source 1..230: mol_type = other DNA

SEQ ID NO: 7947 - DNA, 230 bp, synthetic construct
  misc_feature 1..230: note = promoter
  source 1..230: mol_type = other DNA
gagggcctatttcccatgagtccttcatatttgcatatacgatgcaagaatgttagagagataattagaattaatttgattataaacataaagatattagtgatgcagaaagtaataatttattgggtagtttgtaattttaaaattatgttttaaaatggaccatgacatacttgccgtaagtgtaaagtatttctatttcttgcctttatatatcttctggcaaggac

SEQ ID NO: 7948 - DNA, 230 bp, synthetic construct; identical to SEQ ID NO: 7947
  misc_feature 1..230: note = promoter
  source 1..230: mol_type = other DNA

SEQ ID NO: 7949 - DNA, 230 bp, synthetic construct
  misc_feature 1..230: note = promoter
  source 1..230: mol_type = other DNA
gagggcctatttcccatgagtccttcatatttgcatatacgatgcaagaatgttagagagataattagaattaatttgattataaacataaagatattagtaatgcagaaagtaataatttattgggtagtttgtaattttaaaattatgttttaaaatggaccatgacatacttgccgtaagtgtaaagtatttctatttcttgcctttatatatcttctggcaaggac

SEQ ID NO: 7950 - DNA, 230 bp, synthetic construct
  misc_feature 1..230: note = promoter
  source 1..230: mol_type = other DNA
gagggcctatttcccatgagtccttcatatttgcatatacgatgcaagaatgttagagagataattagaattaatttgattataaacataaagatattagtactgcagaaagtaataatttattgggtagtttgtaattttaaaattatgttttaaaatggaccatgacatacttgccgtaagtgtaaagtatttctatttcttgcctttatatatcttctggcaaggac

SEQ ID NO: 7951 - DNA, 230 bp, synthetic construct
  misc_feature 1..230: note = promoter
  source 1..230: mol_type = other DNA
gagggcctatttcccatgagtccttcatatttgcatatacgatgcaagaatgttagagagataattagaattaatttgattataaacataaagatattagtacagcagaaagtaataatttattgggtagtttgtaattttaaaattatgttttaaaatggaccatgacatacttgccgtaagtgtaaagtatttctatttcttgcctttatatatcttctggcaaggac

SEQ ID NO: 7952 - DNA, 230 bp, synthetic construct
  misc_feature 1..230: note = promoter
  source 1..230: mol_type = other DNA
gagggcctatttcccatgagtccttcatatttgcatatacgatgcaagaatgttagagagataattagaattaatttgattataaacataaagatattagtacaacagaaagtaataatttattgggtagtttgtaattttaaaattatgttttaaaatggaccatgacatacttgccgtaagtgtaaagtatttctatttcttgcctttatatatcttctggcaaggac

SEQ ID NO: 7953 - DNA, 230 bp, synthetic construct
  misc_feature 1..230: note = promoter
  source 1..230: mol_type = other DNA
gagggcctatttcccatgagtccttcatatttgcatatacgatgcaagaatgttagagagataattagaattaatttgattataaacataaagatattagtacaaaagaaagtaataatttattgggtagtttgtaattttaaaattatgttttaaaatggaccatgacatacttgccgtaagtgtaaagtatttctatttcttgcctttatatatcttctggcaaggac

SEQ ID NO: 7954 - DNA, 230 bp, synthetic construct; identical to SEQ ID NO: 7953
  misc_feature 1..230: note = promoter
  source 1..230: mol_type = other DNA

SEQ ID NO: 7955 - DNA, 230 bp, synthetic construct
  misc_feature 1..230: note = promoter
  source 1..230: mol_type = other DNA
gagggcctatttcccatgagtccttcatatttgcatatacgatgcaagaatgttagagagataattagaattaatttgattataaacataaagatattagtacaaaataaagtaataatttattgggtagtttgtaattttaaaattatgttttaaaatggaccatgacatacttgccgtaagtgtaaagtatttctatttcttgcctttatatatcttctggcaaggac

SEQ ID NO: 7956 - DNA, 230 bp, synthetic construct; identical to SEQ ID NO: 7955
  misc_feature 1..230: note = promoter
  source 1..230: mol_type = other DNA

SEQ ID NO: 7957 - DNA, 230 bp, synthetic construct
  misc_feature 1..230: note = promoter
  source 1..230: mol_type = other DNA
gagggcctatttcccatgagtccttcatatttgcatatacgatgcaagaatgttagagagataattagaattaatttgattataaacataaagatattagtacaaaatatagtaataatttattgggtagtttgtaattttaaaattatgttttaaaatggaccatgacatacttgccgtaagtgtaaagtatttctatttcttgcctttatatatcttctggcaaggac

SEQ ID NO: 7958 - DNA, 230 bp, synthetic construct
  misc_feature 1..230: note = promoter
  source 1..230: mol_type = other DNA
gagggcctatttcccatgagtccttcatatttgcatatacgatgcaagaatgttagagagataattagaattaatttgattataaacataaagatattagtacaaaatattgtaataatttattgggtagtttgtaattttaaaattatgttttaaaatggaccatgacatacttgccgtaagtgtaaagtatttctatttcttgcctttatatatcttctggcaaggac

SEQ ID NO: 7959 - DNA, 230 bp, synthetic construct; identical to SEQ ID NO: 7958
  misc_feature 1..230: note = promoter
  source 1..230: mol_type = other DNA

SEQ ID NO: 7960 - DNA, 230 bp, synthetic construct
  misc_feature 1..230: note = promoter
  source 1..230: mol_type = other DNA
gagggcctatttcccatgagtccttcatatttgcatatacgatgcaagaatgttagagagataattagaattaatttgattataaacataaagatattagtacaaaatattgaaataatttattgggtagtttgtaattttaaaattatgttttaaaatggaccatgacatacttgccgtaagtgtaaagtatttctatttcttgcctttatatatcttctggcaaggac

SEQ ID NO: 7961 - DNA, 230 bp, synthetic construct
  misc_feature 1..230: note = promoter
  source 1..230: mol_type = other DNA
gagggcctatttcccatgagtccttcatatttgcatatacgatgcaagaatgttagagagataattagaattaatttgattataaacataaagatattagtacaaaatattgatataatttattgggtagtttgtaattttaaaattatgttttaaaatggaccatgacatacttgccgtaagtgtaaagtatttctatttcttgcctttatatatcttctggcaaggac

SEQ ID NO: 7962 - DNA, 230 bp, synthetic construct
  misc_feature 1..230: note = promoter
  source 1..230: mol_type = other DNA
gagggcctatttcccatgagtccttcatatttgcatatacgatgcaagaatgttagagagataattagaattaatttgattataaacataaagatattagtacaaaatattgatgtaatttattgggtagtttgtaattttaaaattatgttttaaaatggaccatgacatacttgccgtaagtgtaaagtatttctatttcttgcctttatatatcttctggcaaggac

SEQ ID NO: 7963 - DNA, 230 bp, synthetic construct
  misc_feature 1..230: note = promoter
  source 1..230: mol_type = other DNA
gagggcctatttcccatgagtccttcatatttgcatatacgatgcaagaatgttagagagataattagaattaatttgattataaacataaagatattagtacaaaatattgatgcaatttattgggtagtttgtaattttaaaattatgttttaaaatggaccatgacatacttgccgtaagtgtaaagtatttctatttcttgcctttatatatcttctggcaaggac

SEQ ID NO: 7964 - DNA, 230 bp, synthetic construct; identical to SEQ ID NO: 7963
  misc_feature 1..230: note = promoter
  source 1..230: mol_type = other DNA

SEQ ID NO: 7965 - DNA, 230 bp, synthetic construct
  misc_feature 1..230: note = promoter
  source 1..230: mol_type = other DNA
gagggcctatttcccatgagtccttcatatttgcatatacgatgcaagaatgttagagagataattagaattaatttgattataaacataaagatattagtacaaaatattgatgcagtttattgggtagtttgtaattttaaaattatgttttaaaatggaccatgacatacttgccgtaagtgtaaagtatttctatttcttgcctttatatatcttctggcaaggac

SEQ ID NO: 7966 - DNA, 230 bp, synthetic construct
  misc_feature 1..230: note = promoter
  source 1..230: mol_type = other DNA
gagggcctatttcccatgagtccttcatatttgcatatacgatgcaagaatgttagagagataattagaattaatttgattataaacataaagatattagtacaaaatattgatgcagattattgggtagtttgtaattttaaaattatgttttaaaatggaccatgacatacttgccgtaagtgtaaagtatttctatttcttgcctttatatatcttctggcaaggac

SEQ ID NO: 7967 - DNA, 230 bp, synthetic construct
  misc_feature 1..230: note = promoter
  source 1..230: mol_type = other DNA
gagggcctatttcccatgagtccttcatatttgcatatacgatgcaagaatgttagagagataattagaattaatttgattataaacataaagatattagtacaaaatattgatgcagaatattgggtagtttgtaattttaaaattatgttttaaaatggaccatgacatacttgccgtaagtgtaaagtatttctatttcttgcctttatatatcttctggcaaggac

SEQ ID NO: 7968 - DNA, 230 bp, synthetic construct
  misc_feature 1..230: note = promoter
  source 1..230: mol_type = other DNA
gagggcctatttcccatgagtccttcatatttgcatatacgatgcaagaatgttagagagataattagaattaatttgattataaacataaagatattagtacaaaatattgatgcagaaaattgggtagtttgtaattttaaaattatgttttaaaatggaccatgacatacttgccgtaagtgtaaagtatttctatttcttgcctttatatatcttctggcaaggac

SEQ ID NO: 7969 - DNA, 230 bp, synthetic construct
  misc_feature 1..230: note = promoter
  source 1..230: mol_type = other DNA
gagggcctatttcccatgagtccttcatatttgcatatacgatgcaagaatgttagagagataattagaattaatttgattataaacataaagatattagtacaaaatattgatgcagaaagttgggtagtttgtaattttaaaattatgttttaaaatggaccatgacatacttgccgtaagtgtaaagtatttctatttcttgcctttatatatcttctggcaaggac

SEQ ID NO: 7970 - DNA, 230 bp, synthetic construct; identical to SEQ ID NO: 7969
  misc_feature 1..230: note = promoter
  source 1..230: mol_type = other DNA

SEQ ID NO: 7971 - DNA, 230 bp, synthetic construct
  misc_feature 1..230: note = promoter
  source 1..230: mol_type = other DNA
gagggcctatttcccatgagtccttcatatttgcatatacgatgcaagaatgttagagagataattagaattaatttgattataaacataaagatattagtacaaaatattgatgcagaaagtagggtagtttgtaattttaaaattatgttttaaaatggaccatgacatacttgccgtaagtgtaaagtatttctatttcttgcctttatatatcttctggcaaggac

SEQ ID NO: 7972 - DNA, 230 bp, synthetic construct
  misc_feature 1..230: note = promoter
  source 1..230: mol_type = other DNA
gagggcctatttcccatgagtccttcatatttgcatatacgatgcaagaatgttagagagataattagaattaatttgattataaacataaagatattagtacaaaatattgatgcagaaagtaaggtagtttgtaattttaaaattatgttttaaaatggaccatgacatacttgccgtaagtgtaaagtatttctatttcttgcctttatatatcttctggcaaggac

SEQ ID NO: 7973 - DNA, 230 bp, synthetic construct
  misc_feature 1..230: note = promoter
  source 1..230: mol_type = other DNA
gagggcctatttcccatgagtccttcatatttgcatatacgatgcaagaatgttagagagataattagaattaatttgattataaacataaagatattagtacaaaatattgatgcagaaagtaatgtagtttgtaattttaaaattatgttttaaaatggaccatgacatacttgccgtaagtgtaaagtatttctatttcttgcctttatatatcttctggcaaggac

SEQ ID NO: 7974 - DNA, 230 bp, synthetic construct
  misc_feature 1..230: note = promoter
  source 1..230: mol_type = other DNA
gagggcctatttcccatgagtccttcatatttgcatatacgatgcaagaatgttagagagataattagaattaatttgattataaacataaagatattagtacaaaatattgatgcagaaagtaatatagtttgtaattttaaaattatgttttaaaatggaccatgacatacttgccgtaagtgtaaagtatttctatttcttgcctttatatatcttctggcaaggac

SEQ ID NO: 7975 - DNA, 230 bp, synthetic construct
  misc_feature 1..230: note = promoter
  source 1..230: mol_type = other DNA
gagggcctatttcccatgagtccttcatatttgcatatacgatgcaagaatgttagagagataattagaattaatttgattataaacataaagatattagtacaaaatattgatgcagaaagtaataaagtttgtaattttaaaattatgttttaaaatggaccatgacatacttgccgtaagtgtaaagtatttctatttcttgcctttatatatcttctggcaaggac

SEQ ID NO: 7976 - DNA, 230 bp, synthetic construct
  misc_feature 1..230: note = promoter
  source 1..230: mol_type = other DNA
gagggcctatttcccatgagtccttcatatttgcatatacgatgcaagaatgttagagagataattagaattaatttgattataaacataaagatattagtacaaaatattgatgcagaaagtaataatgtttgtaattttaaaattatgttttaaaatggaccatgacatacttgccgtaagtgtaaagtatttctatttcttgcctttatatatcttctggcaaggac

SEQ ID NO: 7977 - DNA, 230 bp, synthetic construct
  misc_feature 1..230: note = promoter
  source 1..230: mol_type = other DNA
gagggcctatttcccatgagtccttcatatttgcatatacgatgcaagaatgttagagagataattagaattaatttgattataaacataaagatattagtacaaaatattgatgcagaaagtaataatttttgtaattttaaaattatgttttaaaatggaccatgacatacttgccgtaagtgtaaagtatttctatttcttgcctttatatatcttctggcaaggac

SEQ ID NO: 7978 - DNA, 230 bp, synthetic construct; identical to SEQ ID NO: 7977
  misc_feature 1..230: note = promoter
  source 1..230: mol_type = other DNA

SEQ ID NO: 7979 - DNA, 230 bp, synthetic construct
  misc_feature 1..230: note = promoter
  source 1..230: mol_type = other DNA
gagggcctatttcccatgagtccttcatatttgcatatacgatgcaagaatgttagagagataattagaattaatttgattataaacataaagatattagtacaaaatattgatgcagaaagtaataatttatgtaattttaaaattatgttttaaaatggaccatgacatacttgccgtaagtgtaaagtatttctatttcttgcctttatatatcttctggcaaggac

SEQ ID NO: 7980 - DNA, 230 bp, synthetic construct; identical to SEQ ID NO: 7979
  misc_feature 1..230: note = promoter
  source 1..230: mol_type = other DNA

SEQ ID NO: 7981 - DNA, 230 bp, synthetic construct
  misc_feature 1..230: note = promoter
  source 1..230: mol_type = other DNA
gagggcctatttcccatgagtccttcatatttgcatatacgatgcaagaatgttagagagataattagaattaatttgattataaacataaagatattagtacaaaatattgatgcagaaagtaataatttatttaattttaaaattatgttttaaaatggaccatgacatacttgccgtaagtgtaaagtatttctatttcttgcctttatatatcttctggcaaggac

SEQ ID NO: 7982 - DNA, 230 bp, synthetic construct
  misc_feature 1..230: note = promoter
  source 1..230: mol_type = other DNA
gagggcctatttcccatgagtccttcatatttgcatatacgatgcaagaatgttagagagataattagaattaatttgattataaacataaagatattagtacaaaatattgatgcagaaagtaataatttattgaattttaaaattatgttttaaaatggaccatgacatacttgccgtaagtgtaaagtatttctatttcttgcctttatatatcttctggcaaggac

SEQ ID NO: 7983 - DNA, 230 bp, synthetic construct
  misc_feature 1..230: note = promoter
  source 1..230: mol_type = other DNA
gagggcctatttcccatgagtccttcatatttgcatatacgatgcaagaatgttagagagataattagaattaatttgattataaacataaagatattagtacaaaatattgatgcagaaagtaataatttattggattttaaaattatgttttaaaatggaccatgacatacttgccgtaagtgtaaagtatttctatttcttgcctttatatatcttctggcaaggac

SEQ ID NO: 7984 - DNA, 230 bp, synthetic construct
  misc_feature 1..230: note = promoter
  source 1..230: mol_type = other DNA
gagggcctatttcccatgagtccttcatatttgcatatacgatgcaagaatgttagagagataattagaattaatttgattataaacataaagatattagtacaaaatattgatgcagaaagtaataatttattgggttttaaaattatgttttaaaatggaccatgacatacttgccgtaagtgtaaagtatttctatttcttgcctttatatatcttctggcaaggac

SEQ ID NO: 7985 - DNA, 230 bp, synthetic construct; identical to SEQ ID NO: 7984
  misc_feature 1..230: note = promoter
  source 1..230: mol_type = other DNA

SEQ ID NO: 7986 - DNA, 230 bp, synthetic construct
  misc_feature 1..230: note = promoter
  source 1..230: mol_type = other DNA
gagggcctatttcccatgagtccttcatatttgcatatacgatgcaagaatgttagagagataattagaattaatttgattataaacataaagatattagtacaaaatattgatgcagaaagtaataatttattgggtattaaaattatgttttaaaatggaccatgacatacttgccgtaagtgtaaagtatttctatttcttgcctttatatatcttctggcaaggac

SEQ ID NO: 7987 - DNA, 230 bp, synthetic construct
  misc_feature 1..230: note = promoter
  source 1..230: mol_type = other DNA
gagggcctatttcccatgagtccttcatatttgcatatacgatgcaagaatgttagagagataattagaattaatttgattataaacataaagatattagtacaaaatattgatgcagaaagtaataatttattgggtagtaaaattatgttttaaaatggaccatgacatacttgccgtaagtgtaaagtatttctatttcttgcctttatatatcttctggcaaggac

SEQ ID NO: 7988 - DNA, 230 bp, synthetic construct; identical to SEQ ID NO: 7987
  misc_feature 1..230: note = promoter
  source 1..230: mol_type = other DNA

SEQ ID NO: 7989 - DNA, 230 bp, synthetic construct
  misc_feature 1..230: note = promoter
  source 1..230: mol_type = other DNA
gagggcctatttcccatgagtccttcatatttgcatatacgatgcaagaatgttagagagataattagaattaatttgattataaacataaagatattagtacaaaatattgatgcagaaagtaataatttattgggtagttaaattatgttttaaaatggaccatgacatacttgccgtaagtgtaaagtatttctatttcttgcctttatatatcttctggcaaggac

SEQ ID NO: 7990 - DNA, 230 bp, synthetic construct
  misc_feature 1..230: note = promoter
  source 1..230: mol_type = other DNA
gagggcctatttcccatgagtccttcatatttgcatatacgatgcaagaatgttagagagataattagaattaatttgattataaacataaagatattagtacaaaatattgatgcagaaagtaataatttattgggtagtttaattatgttttaaaatggaccatgacatacttgccgtaagtgtaaagtatttctatttcttgcctttatatatcttctggcaaggac

SEQ ID NO: 7991 - DNA, 230 bp, synthetic construct
  misc_feature 1..230: note = promoter
  source 1..230: mol_type = other DNA
gagggcctatttcccatgagtccttcatatttgcatatacgatgcaagaatgttagagagataattagaattaatttgattataaacataaagatattagtacaaaatattgatgcagaaagtaataatttattgggtagtttgattatgttttaaaatggaccatgacatacttgccgtaagtgtaaagtatttctatttcttgcctttatatatcttctggcaaggac

SEQ ID NO: 7992 - DNA, 230 bp, synthetic construct
  misc_feature 1..230: note = promoter
  source 1..230: mol_type = other DNA
gagggcctatttcccatgagtccttcatatttgcatatacgatgcaagaatgttagagagataattagaattaatttgattataaacataaagatattagtacaaaatattgatgcagaaagtaataatttattgggtagtttgtttatgttttaaaatggaccatgacatacttgccgtaagtgtaaagtatttctatttcttgcctttatatatcttctggcaaggac

SEQ ID NO: 7993 - DNA, 230 bp, synthetic construct
  misc_feature 1..230: note = promoter
  source 1..230: mol_type = other DNA
gagggcctatttcccatgagtccttcatatttgcatatacgatgcaagaatgttagagagataattagaattaatttgattataaacataaagatattagtacaaaatattgatgcagaaagtaataatttattgggtagtttgtatatgttttaaaatggaccatgacatacttgccgtaagtgtaaagtatttctatttcttgcctttatatatcttctggcaaggac

SEQ ID NO: 7994 - DNA, 230 bp, synthetic construct
  misc_feature 1..230: note = promoter
  source 1..230: mol_type = other DNA
gagggcctatttcccatgagtccttcatatttgcatatacgatgcaagaatgttagagagataattagaattaatttgattataaacataaagatattagtacaaaatattgatgcagaaagtaataatttattgggtagtttgtaaatgttttaaaatggaccatgacatacttgccgtaagtgtaaagtatttctatttcttgcctttatatatcttctggcaaggac

SEQ ID NO: 7995 - DNA, 230 bp, synthetic construct
  misc_feature 1..230: note = promoter
  source 1..230: mol_type = other DNA
gagggcctatttcccatgagtccttcatatttgcatatacgatgcaagaatgttagagagataattagaattaatttgattataaacataaagatattagtacaaaatattgatgcagaaagtaataatttattgggtagtttgtaattgttttaaaatggaccatgacatacttgccgtaagtgtaaagtatttctatttcttgcctttatatatcttctggcaaggac

SEQ ID NO: 7996 - DNA, 230 bp, synthetic construct; identical to SEQ ID NO: 7995
  misc_feature 1..230: note = promoter
  source 1..230: mol_type = other DNA

SEQ ID NO: 7997 - DNA, 230 bp, synthetic construct
  misc_feature 1..230: note = promoter
  source 1..230: mol_type = other DNA
gagggcctatttcccatgagtccttcatatttgcatatacgatgcaagaatgttagagagataattagaattaatttgattataaacataaagatattagtacaaaatattgatgcagaaagtaataatttattgggtagtttgtaatttttttaaaatggaccatgacatacttgccgtaagtgtaaagtatttctatttcttgcctttatatatcttctggcaaggac

SEQ ID NO: 7998 - DNA, 230 bp, synthetic construct; identical to SEQ ID NO: 7997
  misc_feature 1..230: note = promoter
  source 1..230: mol_type = other DNA

SEQ ID NO: 7999 - DNA, 230 bp, synthetic construct
  misc_feature 1..230: note = promoter
  source 1..230: mol_type = other DNA
gagggcctatttcccatgagtccttcatatttgcatatacgatgcaagaatgttagagagataattagaattaatttgattataaacataaagatattagtacaaaatattgatgcagaaagtaataatttattgggtagtttgtaattttattaaaatggaccatgacatacttgccgtaagtgtaaagtatttctatttcttgcctttatatatcttctggcaaggac

SEQ ID NO: 8000 - DNA, 230 bp, synthetic construct
  misc_feature 1..230: note = promoter
  source 1..230: mol_type = other DNA
gagggcctatttcccatgagtccttcatatttgcatatacgatgcaagaatgttagagagataattagaattaatttgattataaacataaagatattagtacaaaatattgatgcagaaagtaataatttattgggtagtttgtaattttaataaaatggaccatgacatacttgccgtaagtgtaaagtatttctatttcttgcctttatatatcttctggcaaggac

SEQ ID NO: 8001 - DNA, 230 bp, synthetic construct
  misc_feature 1..230: note = promoter
  source 1..230: mol_type = other DNA
gagggcctatttcccatgagtccttcatatttgcatatacgatgcaagaatgttagagagataattagaattaatttgattataaacataaagatattagtacaaaatattgatgcagaaagtaataatttattgggtagtttgtaattttaaaaaaatggaccatgacatacttgccgtaagtgtaaagtatttctatttcttgcctttatatatcttctggcaaggac

SEQ ID NO: 8002 - DNA, 230 bp, synthetic construct; identical to SEQ ID NO: 8001
  misc_feature 1..230: note = promoter
  source 1..230: mol_type = other DNA

SEQ ID NO: 8003 - DNA, 230 bp, synthetic construct
  misc_feature 1..230: note = promoter
  source 1..230: mol_type = other DNA
gagggcctatttcccatgagtccttcatatttgcatatacgatgcaagaatgttagagagataattagaattaatttgattataaacataaagatattagtacaaaatattgatgcagaaagtaataatttattgggtagtttgtaattttaaaataatggaccatgacatacttgccgtaagtgtaaagtatttctatttcttgcctttatatatcttctggcaaggac

SEQ ID NO: 8004 - DNA, 230 bp, synthetic construct
  misc_feature 1..230: note = promoter
  source 1..230: mol_type = other DNA
gagggcctatttcccatgagtccttcatatttgcatatacgatgcaagaatgttagagagataattagaattaatttgattataaacataaagatattagtacaaaatattgatgcagaaagtaataatttattgggtagtttgtaattttaaaattatggaccatgacatacttgccgtaagtgtaaagtatttctatttcttgcctttatatatcttctggcaaggac

SEQ ID NO: 8005 - DNA, 230 bp, synthetic construct; identical to SEQ ID NO: 8004
  misc_feature 1..230: note = promoter
  source 1..230: mol_type = other DNA

SEQ ID NO: 8006 - DNA, 230 bp, synthetic construct; identical to SEQ ID NO: 8004
  misc_feature 1..230: note = promoter
  source 1..230: mol_type = other DNA

SEQ ID NO: 8007 - DNA, 230 bp, synthetic construct; identical to SEQ ID NO: 8004
  misc_feature 1..230: note = promoter
  source 1..230: mol_type = other DNA

SEQ ID NO: 8008 - DNA, 230 bp, synthetic construct
  misc_feature 1..230: note = promoter
  source 1..230: mol_type = other DNA
gagggcctatttcccatgagtccttcatatttgcatatacgatgcaagaatgttagagagataattagaattaatttgattataaacataaagatattagtacaaaatattgatgcagaaagtaataatttattgggtagtttgtaattttaaaattatgtaccatgacatacttgccgtaagtgtaaagtatttctatttcttgcctttatatatcttctggcaaggac

SEQ ID NO: 8009 - DNA, 230 bp, synthetic construct
  misc_feature 1..230: note = promoter
  source 1..230: mol_type = other DNA
gagggcctatttcccatgagtccttcatatttgcatatacgatgcaagaatgttagagagataattagaattaatttgattataaacataaagatattagtacaaaatattgatgcagaaagtaataatttattgggtagtttgtaattttaaaattatgttccatgacatacttgccgtaagtgtaaagtatttctatttcttgcctttatatatcttctggcaaggac

SEQ ID NO: 8010 - DNA, 230 bp, synthetic construct
  misc_feature 1..230: note = promoter
  source 1..230: mol_type = other DNA
gagggcctatttcccatgagtccttcatatttgcatatacgatgcaagaatgttagagagataattagaattaatttgattataaacataaagatattagtacaaaatattgatgcagaaagtaataatttattgggtagtttgtaattttaaaattatgtttcatgacatacttgccgtaagtgtaaagtatttctatttcttgcctttatatatcttctggcaaggac

SEQ ID NO: 8011 - DNA, 230 bp, synthetic construct
  misc_feature 1..230: note = promoter
  source 1..230: mol_type = other DNA
gagggcctatttcccatgagtccttcatatttgcatatacgatgcaagaatgttagagagataattagaattaatttgattataaacataaagatattagtacaaaatattgatgcagaaagtaataatttattgggtagtttgtaattttaaaattatgttttatgacatacttgccgtaagtgtaaagtatttctatttcttgcctttatatatcttctggcaaggac

SEQ ID NO: 8012 - DNA, 230 bp, synthetic construct; identical to SEQ ID NO: 8011
  misc_feature 1..230: note = promoter
  source 1..230: mol_type = other DNA

SEQ ID NO: 8013 - DNA, 230 bp, synthetic construct
  misc_feature 1..230: note = promoter
  source 1..230: mol_type = other DNA
gagggcctatttcccatgagtccttcatatttgcatatacgatgcaagaatgttagagagataattagaattaatttgattataaacataaagatattagtacaaaatattgatgcagaaagtaataatttattgggtagtttgtaattttaaaattatgttttaagacatacttgccgtaagtgtaaagtatttctatttcttgcctttatatatcttctggcaaggac

SEQ ID NO: 8014 - DNA, 230 bp, synthetic construct
  misc_feature 1..230: note = promoter
  source 1..230: mol_type = other DNA
gagggcctatttcccatgagtccttcatatttgcatatacgatgcaagaatgttagagagataattagaattaatttgattataaacataaagatattagtacaaaatattgatgcagaaagtaataatttattgggtagtttgtaattttaaaattatgttttaaaacatacttgccgtaagtgtaaagtatttctatttcttgcctttatatatcttctggcaaggac

SEQ ID NO: 8015 - DNA, 230 bp, synthetic construct; identical to SEQ ID NO: 8014
  misc_feature 1..230: note = promoter
  source 1..230: mol_type = other DNA

SEQ ID NO: 8016 - DNA, 230 bp, synthetic construct
  misc_feature 1..230: note = promoter
  source 1..230: mol_type = other DNA
gagggcctatttcccatgagtccttcatatttgcatatacgatgcaagaatgttagagagataattagaattaatttgattataaacataaagatattagtacaaaatattgatgcagaaagtaataatttattgggtagtttgtaattttaaaattatgttttaaaatatacttgccgtaagtgtaaagtatttctatttcttgcctttatatatcttctggcaaggac

SEQ ID NO: 8017 - DNA, 230 bp, synthetic construct
  misc_feature 1..230: note = promoter
  source 1..230: mol_type = other DNA
gagggcctatttcccatgagtccttcatatttgcatatacgatgcaagaatgttagagagataattagaattaatttgattataaacataaagatattagtacaaaatattgatgcagaaagtaataatttattgggtagtttgtaattttaaaattatgttttaaaatgtacttgccgtaagtgtaaagtatttctatttcttgcctttatatatcttctggcaaggac

SEQ ID NO: 8018 - DNA, 230 bp, synthetic construct
  misc_feature 1..230: note = promoter
  source 1..230: mol_type = other DNA
gagggcctatttcccatgagtccttcatatttgcatatacgatgcaagaatgttagagagataattagaattaatttgattataaacataaagatattagtacaaaatattgatgcagaaagtaataatttattgggtagtttgtaattttaaaattatgttttaaaatggacttgccgtaagtgtaaagtatttctatttcttgcctttatatatcttctggcaaggac

SEQ ID NO: 8019 - DNA, 230 bp, synthetic construct; identical to SEQ ID NO: 8018
  misc_feature 1..230: note = promoter
  source 1..230: mol_type = other DNA

SEQ ID NO: 8020 - DNA, 230 bp, synthetic construct; identical to SEQ ID NO: 8018
  misc_feature 1..230: note = promoter
  source 1..230: mol_type = other DNA

SEQ ID NO: 8021 - DNA, 230 bp, synthetic construct
  misc_feature 1..230: note = promoter
  source 1..230: mol_type = other DNA
gagggcctatttcccatgagtccttcatatttgcatatacgatgcaagaatgttagagagataattagaattaatttgattataaacataaagatattagtacaaaatattgatgcagaaagtaataatttattgggtagtttgtaattttaaaattatgttttaaaatggacctgccgtaagtgtaaagtatttctatttcttgcctttatatatcttctggcaaggac

SEQ ID NO: 8022 - DNA, 230 bp, synthetic construct
  misc_feature 1..230: note = promoter
  source 1..230: mol_type = other DNA
gagggcctatttcccatgagtccttcatatttgcatatacgatgcaagaatgttagagagataattagaattaatttgattataaacataaagatattagtacaaaatattgatgcagaaagtaataatttattgggtagtttgtaattttaaaattatgttttaaaatggaccagccgtaagtgtaaagtatttctatttcttgcctttatatatcttctggcaaggac

SEQ ID NO: 8023 - DNA, 230 bp, synthetic construct
  misc_feature 1..230: note = promoter
  source 1..230: mol_type = other DNA
gagggcctatttcccatgagtccttcatatttgcatatacgatgcaagaatgttagagagataattagaattaatttgattataaacataaagatattagtacaaaatattgatgcagaaagtaataatttattgggtagtttgtaattttaaaattatgttttaaaatggaccatccgtaagtgtaaagtatttctatttcttgcctttatatatcttctggcaaggac

SEQ ID NO: 8024 - DNA, 230 bp, synthetic construct
  misc_feature 1..230: note = promoter
  source 1..230: mol_type = other DNA
gagggcctatttcccatgagtccttcatatttgcatatacgatgcaagaatgttagagagataattagaattaatttgattataaacataaagatattagtacaaaatattgatgcagaaagtaataatttattgggtagtttgtaattttaaaattatgttttaaaatggaccatgcgtaagtgtaaagtatttctatttcttgcctttatatatcttctggcaaggac

SEQ ID NO: 8025 - DNA, 230 bp, synthetic construct
  misc_feature 1..230: note = promoter
  source 1..230: mol_type = other DNA
gagggcctatttcccatgagtccttcatatttgcatatacgatgcaagaatgttagagagataattagaattaatttgattataaacataaagatattagtacaaaatattgatgcagaaagtaataatttattgggtagtttgtaattttaaaattatgttttaaaatggaccatgagtaagtgtaaagtatttctatttcttgcctttatatatcttctggcaaggac

SEQ ID NO: 8026 - DNA, 230 bp, synthetic construct
  misc_feature 1..230: note = promoter
  source 1..230: mol_type = other DNA
gagggcctatttcccatgagtccttcatatttgcatatacgatgcaagaatgttagagagataattagaattaatttgattataaacataaagatattagtacaaaatattgatgcagaaagtaataatttattgggtagtttgtaattttaaaattatgttttaaaatggaccatgactaagtgtaaagtatttctatttcttgcctttatatatcttctggcaaggac

SEQ ID NO: 8027 - DNA, 230 bp, synthetic construct
  misc_feature 1..230: note = promoter
  source 1..230: mol_type = other DNA
gagggcctatttcccatgagtccttcatatttgcatatacgatgcaagaatgttagagagataattagaattaatttgattataaacataaagatattagtacaaaatattgatgcagaaagtaataatttattgggtagtttgtaattttaaaattatgttttaaaatggaccatgacaaagtgtaaagtatttctatttcttgcctttatatatcttctggcaaggac

SEQ ID NO: 8028 - DNA, 230 bp, synthetic construct
  misc_feature 1..230: note = promoter
  source 1..230: mol_type = other DNA
gagggcctatttcccatgagtccttcatatttgcatatacgatgcaagaatgttagagagataattagaattaatttgattataaacataaagatattagtacaaaatattgatgcagaaagtaataatttattgggtagtttgtaattttaaaattatgttttaaaatggaccatgacatagtgtaaagtatttctatttcttgcctttatatatcttctggcaaggac

SEQ ID NO: 8029 - DNA, 230 bp, synthetic construct; identical to SEQ ID NO: 8028
  misc_feature 1..230: note = promoter
  source 1..230: mol_type = other DNA

SEQ ID NO: 8030 - DNA, 230 bp, synthetic construct
  misc_feature 1..230: note = promoter
  source 1..230: mol_type = other DNA
gagggcctatttcccatgagtccttcatatttgcatatacgatgcaagaatgttagagagataattagaattaatttgattataaacataaagatattagtacaaaatattgatgcagaaagtaataatttattgggtagtttgtaattttaaaattatgttttaaaatggaccatgacatactgtaaagtatttctatttcttgcctttatatatcttctggcaaggac

SEQ ID NO: 8031 - DNA, 230 bp, synthetic construct; identical to SEQ ID NO: 8030
  misc_feature 1..230: note = promoter
  source 1..230: mol_type = other DNA

SEQ ID NO: 8032 - DNA, 230 bp, synthetic construct
  misc_feature 1..230: note = promoter
  source 1..230: mol_type = other DNA
gagggcctatttcccatgagtccttcatatttgcatatacgatgcaagaatgttagagagataattagaattaatttgattataaacataaagatattagtacaaaatattgatgcagaaagtaataatttattgggtagtttgtaattttaaaattatgttttaaaatggaccatgacatactttaaagtatttctatttcttgcctttatatatcttctggcaaggac

SEQ ID NO: 8033 - DNA, 230 bp, synthetic construct
  misc_feature 1..230: note = promoter
  source 1..230: mol_type = other DNA
gagggcctatttcccatgagtccttcatatttgcatatacgatgcaagaatgttagagagataattagaattaatttgattataaacataaagatattagtacaaaatattgatgcagaaagtaataatttattgggtagtttgtaattttaaaattatgttttaaaatggaccatgacatacttgaaagtatttctatttcttgcctttatatatcttctggcaaggac

SEQ ID NO: 8034 - DNA, 230 bp, synthetic construct
  misc_feature 1..230: note = promoter
  source 1..230: mol_type = other DNA
gagggcctatttcccatgagtccttcatatttgcatatacgatgcaagaatgttagagagataattagaattaatttgattataaacataaagatattagtacaaaatattgatgcagaaagtaataatttattgggtagtttgtaattttaaaattatgttttaaaatggaccatgacatacttgcaagtatttctatttcttgcctttatatatcttctggcaaggac

SEQ ID NO: 8035 - DNA, 230 bp, synthetic construct
  misc_feature 1..230: note = promoter
  source 1..230: mol_type = other DNA
gagggcctatttcccatgagtccttcatatttgcatatacgatgcaagaatgttagagagataattagaattaatttgattataaacataaagatattagtacaaaatattgatgcagaaagtaataatttattgggtagtttgtaattttaaaattatgttttaaaatggaccatgacatacttgccagtatttctatttcttgcctttatatatcttctggcaaggac

SEQ ID NO: 8036 - DNA, 230 bp, synthetic construct
  misc_feature 1..230: note = promoter
  source 1..230: mol_type = other DNA
gagggcctatttcccatgagtccttcatatttgcatatacgatgcaagaatgttagagagataattagaattaatttgattataaacataaagatattagtacaaaatattgatgcagaaagtaataatttattgggtagtttgtaattttaaaattatgttttaaaatggaccatgacatacttgccggtatttctatttcttgcctttatatatcttctggcaaggac

SEQ ID NO: 8037 - DNA, 230 bp, synthetic construct
  misc_feature 1..230: note = promoter
  source 1..230: mol_type = other DNA
gagggcctatttcccatgagtccttcatatttgcatatacgatgcaagaatgttagagagataattagaattaatttgattataaacataaagatattagtacaaaatattgatgcagaaagtaataatttattgggtagtttgtaattttaaaattatgttttaaaatggaccatgacatacttgccgttatttctatttcttgcctttatatatcttctggcaaggac

SEQ ID NO: 8038 - DNA, 230 bp, synthetic construct
  misc_feature 1..230: note = promoter
  source 1..230: mol_type = other DNA
gagggcctatttcccatgagtccttcatatttgcatatacgatgcaagaatgttagagagataattagaattaatttgattataaacataaagatattagtacaaaatattgatgcagaaagtaataatttattgggtagtttgtaattttaaaattatgttttaaaatggaccatgacatacttgccgtaatttctatttcttgcctttatatatcttctggcaaggac

SEQ ID NO: 8039 - DNA, 230 bp, synthetic construct; identical to SEQ ID NO: 8038
  misc_feature 1..230: note = promoter
  source 1..230: mol_type = other DNA

SEQ ID NO: 8040 - DNA, 230 bp, synthetic construct
  misc_feature 1..230: note = promoter
  source 1..230: mol_type = other DNA
gagggcctatttcccatgagtccttcatatttgcatatacgatgcaagaatgttagagagataattagaattaatttgattataaacataaagatattagtacaaaatattgatgcagaaagtaataatttattgggtagtttgtaattttaaaattatgttttaaaatggaccatgacatacttgccgtaagttctatttcttgcctttatatatcttctggcaaggac

SEQ ID NO: 8041 - DNA, 230 bp, synthetic construct; identical to SEQ ID NO: 8040
  misc_feature 1..230: note = promoter
  source 1..230: mol_type = other DNA

SEQ ID NO: 8042 - DNA, 230 bp, synthetic construct
  misc_feature 1..230: note = promoter
  source 1..230: mol_type = other DNA
gagggcctatttcccatgagtccttcatatttgcatatacgatgcaagaatgttagagagataattagaattaatttgattataaacataaagatattagtacaaaatattgatgcagaaagtaataatttattgggtagtttgtaattttaaaattatgttttaaaatggaccatgacatacttgccgtaagtgctatttcttgcctttatatatcttctggcaaggac

SEQ ID NO: 8043 - DNA, 230 bp, synthetic construct
  misc_feature 1..230: note = promoter
  source 1..230: mol_type = other DNA
gagggcctatttcccatgagtccttcatatttgcatatacgatgcaagaatgttagagagataattagaattaatttgattataaacataaagatattagtacaaaatattgatgcagaaagtaataatttattgggtagtttgtaattttaaaattatgttttaaaatggaccatgacatacttgccgtaagtgttatttcttgcctttatatatcttctggcaaggac

SEQ ID NO: 8044 - DNA, 230 bp, synthetic construct
  misc_feature 1..230: note = promoter
  source 1..230: mol_type = other DNA
gagggcctatttcccatgagtccttcatatttgcatatacgatgcaagaatgttagagagataattagaattaatttgattataaacataaagatattagtacaaaatattgatgcagaaagtaataatttattgggtagtttgtaattttaaaattatgttttaaaatggaccatgacatacttgccgtaagtgtaatttcttgcctttatatatcttctggcaaggac

SEQ ID NO: 8045 - DNA, 230 bp, synthetic construct; identical to SEQ ID NO: 8044
  misc_feature 1..230: note = promoter
  source 1..230: mol_type = other DNA

SEQ ID NO: 8046 - DNA, 230 bp, synthetic construct
  misc_feature 1..230: note = promoter
  source 1..230: mol_type = other DNA
gagggcctatttcccatgagtccttcatatttgcatatacgatgcaagaatgttagagagataattagaattaatttgattataaacataaagatattagtacaaaatattgatgcagaaagtaataatttattgggtagtttgtaattttaaaattatgttttaaaatggaccatgacatacttgccgtaagtgtaaattcttgcctttatatatcttctggcaaggac

SEQ ID NO: 8047 - DNA, 230 bp, synthetic construct
  misc_feature 1..230: note = promoter
  source 1..230: mol_type = other DNA
gagggcctatttcccatgagtccttcatatttgcatatacgatgcaagaatgttagagagataattagaattaatttgattataaacataaagatattagtacaaaatattgatgcagaaagtaataatttattgggtagtttgtaattttaaaattatgttttaaaatggaccatgacatacttgccgtaagtgtaaagtcttgcctttatatatcttctggcaaggac

SEQ ID NO: 8048 - DNA, 230 bp, synthetic construct; identical to SEQ ID NO: 8047
  misc_feature 1..230: note = promoter
  source 1..230: mol_type = other DNA

SEQ ID NO: 8049 - DNA, 230 bp, synthetic construct
  misc_feature 1..230: note = promoter
  source 1..230: mol_type = other DNA
gagggcctatttcccatgagtccttcatatttgcatatacgatgcaagaatgttagagagataattagaattaatttgattataaacataaagatattagtacaaaatattgatgcagaaagtaataatttattgggtagtttgtaattttaaaattatgttttaaaatggaccatgacatacttgccgtaagtgtaaagtattgcctttatatatcttctggcaaggac

SEQ ID NO: 8050 - DNA, 230 bp, synthetic construct; identical to SEQ ID NO: 8049
  misc_feature 1..230: note = promoter
  source 1..230: mol_type = other DNA

SEQ ID NO: 8051 - DNA, 230 bp, synthetic construct; identical to SEQ ID NO: 8049
  misc_feature 1..230: note = promoter
  source 1..230: mol_type = other DNA

SEQ ID NO: 8052 - DNA, 230 bp, synthetic construct
  misc_feature 1..230: note = promoter
  source 1..230: mol_type = other DNA
gagggcctatttcccatgagtccttcatatttgcatatacgatgcaagaatgttagagagataattagaattaatttgattataaacataaagatattagtacaaaatattgatgcagaaagtaataatttattgggtagtttgtaattttaaaattatgttttaaaatggaccatgacatacttgccgtaagtgtaaagtatttcctttatatatcttctggcaaggac

SEQ ID NO: 8053 - DNA, 230 bp, synthetic construct; identical to SEQ ID NO: 8052
  misc_feature 1..230: note = promoter
  source 1..230: mol_type = other DNA

SEQ ID NO: 8054 - DNA, 230 bp, synthetic construct
  misc_feature 1..230: note = promoter
  source 1..230: mol_type = other DNA
gagggcctatttcccatgagtccttcatatttgcatatacgatgcaagaatgttagagagataattagaattaatttgattataaacataaagatattagtacaaaatattgatgcagaaagtaataatttattgggtagtttgtaattttaaaattatgttttaaaatggaccatgacatacttgccgtaagtgtaaagtatttcttttatatatcttctggcaaggac

SEQ ID NO: 8055 - DNA, 230 bp, synthetic construct
  misc_feature 1..230: note = promoter
  source 1..230: mol_type = other DNA
gagggcctatttcccatgagtccttcatatttgcatatacgatgcaagaatgttagagagataattagaattaatttgattataaacataaagatattagtacaaaatattgatgcagaaagtaataatttattgggtagtttgtaattttaaaattatgttttaaaatggaccatgacatacttgccgtaagtgtaaagtatttctattatatatcttctggcaaggac

SEQ ID NO: 8056 - DNA, 230 bp, synthetic construct; identical to SEQ ID NO: 8055
  misc_feature 1..230: note = promoter
  source 1..230: mol_type = other DNA

SEQ ID NO: 8057 - DNA, 230 bp, synthetic construct; identical to SEQ ID NO: 8055
  misc_feature 1..230: note = promoter
  source 1..230: mol_type = other DNA

SEQ ID NO: 8058 - DNA, 230 bp, synthetic construct
  misc_feature 1..230: note = promoter
  source 1..230: mol_type = other DNA
gagggcctatttcccatgagtccttcatatttgcatatacgatgcaagaatgttagagagataattagaattaatttgattataaacataaagatattagtacaaaatattgatgcagaaagtaataatttattgggtagtttgtaattttaaaattatgttttaaaatggaccatgacatacttgccgtaagtgtaaagtatttctattttatatcttctggcaaggac

SEQ ID NO: 8059 - DNA, 230 bp, synthetic construct
  misc_feature 1..230: note = promoter
  source 1..230: mol_type = other DNA
gagggcctatttcccatgagtccttcatatttgcatatacgatgcaagaatgttagagagataattagaattaatttgattataaacataaagatattagtacaaaatattgatgcagaaagtaataatttattgggtagtttgtaattttaaaattatgttttaaaatggaccatgacatacttgccgtaagtgtaaagtatttctatttcatatcttctggcaaggac

SEQ ID NO: 8060 - DNA, 230 bp, synthetic construct
  misc_feature 1..230: note = promoter
  source 1..230: mol_type = other DNA
gagggcctatttcccatgagtccttcatatttgcatatacgatgcaagaatgttagagagataattagaattaatttgattataaacataaagatattagtacaaaatattgatgcagaaagtaataatttattgggtagtttgtaattttaaaattatgttttaaaatggaccatgacatacttgccgtaagtgtaaagtatttctatttcttatcttctggcaaggac

SEQ ID NO: 8061 - DNA, 230 bp, synthetic construct; identical to SEQ ID NO: 8060
  misc_feature 1..230: note = promoter
  source 1..230: mol_type = other DNA

SEQ ID NO: 8062 - DNA, 230 bp, synthetic construct
  misc_feature 1..230: note = promoter
  source 1..230: mol_type = other DNA
gagggcctatttcccatgagtccttcatatttgcatatacgatgcaagaatgttagagagataattagaattaatttgattataaacataaagatattagtacaaaatattgatgcagaaagtaataatttattgggtagtttgtaattttaaaattatgttttaaaatggaccatgacatacttgccgtaagtgtaaagtatttctatttcttgtcttctggcaaggac

SEQ ID NO: 8063 - DNA, 230 bp, synthetic construct
  misc_feature 1..230: note = promoter
  source 1..230: mol_type = other DNA
gagggcctatttcccatgagtccttcatatttgcatatacgatgcaagaatgttagagagataattagaattaatttgattataaacataaagatattagtacaaaatattgatgcagaaagtaataatttattgggtagtttgtaattttaaaattatgttttaaaatggaccatgacatacttgccgtaagtgtaaagtatttctatttcttgccttctggcaaggac

SEQ ID NO: 8064 - DNA, 230 bp, synthetic construct; identical to SEQ ID NO: 8063
  misc_feature 1..230: note = promoter
  source 1..230: mol_type = other DNA

SEQ ID NO: 8065 - DNA, 230 bp, synthetic construct; identical to SEQ ID NO: 8063
  misc_feature 1..230: note = promoter
  source 1..230: mol_type = other DNA

SEQ ID NO: 8066 - DNA, 230 bp, synthetic construct; identical to SEQ ID NO: 8063
  misc_feature 1..230: note = promoter
  source 1..230: mol_type = other DNA

SEQ ID NO: 8067 - DNA, 230 bp, synthetic construct
  misc_feature 1..230: note = promoter
  source 1..230: mol_type = other DNA
gagggcctatttcccatgagtccttcatatttgcatatacgatgcaagaatgttagagagataattagaattaatttgattataaacataaagatattagtacaaaatattgatgcagaaagtaataatttattgggtagtttgtaattttaaaattatgttttaaaatggaccatgacatacttgccgtaagtgtaaagtatttctatttcttgccttttggcaaggac

SEQ ID NO: 8068 - DNA, 230 bp, synthetic construct
  misc_feature 1..230: note = promoter
  source 1..230: mol_type = other DNA
gagggcctatttcccatgagtccttcatatttgcatatacgatgcaagaatgttagagagataattagaattaatttgattataaacataaagatattagtacaaaatattgatgcagaaagtaataatttattgggtagtttgtaattttaaaattatgttttaaaatggaccatgacatacttgccgtaagtgtaaagtatttctatttcttgcctttaggcaaggac

SEQ ID NO: 8069 - DNA, 230 bp, synthetic construct
  misc_feature 1..230: note = promoter
  source 1..230: mol_type = other DNA
gagggcctatttcccatgagtccttcatatttgcatatacgatgcaagaatgttagagagataattagaattaatttgattataaacataaagatattagtacaaaatattgatgcagaaagtaataatttattgggtagtttgtaattttaaaattatgttttaaaatggaccatgacatacttgccgtaagtgtaaagtatttctatttcttgcctttatgcaaggac

SEQ ID NO: 8070 - DNA, 230 bp, synthetic construct
  misc_feature 1..230: note = promoter
  source 1..230: mol_type = other DNA
gagggcctatttcccatgagtccttcatatttgcatatacgatgcaagaatgttagagagataattagaattaatttgattataaacataaagatattagtacaaaatattgatgcagaaagtaataatttattgggtagtttgtaattttaaaattatgttttaaaatggaccatgacatacttgccgtaagtgtaaagtatttctatttcttgcctttatacaaggac

SEQ ID NO: 8071 - DNA, 230 bp, synthetic construct
  misc_feature 1..230: note = promoter
  source 1..230: mol_type = other DNA
gagggcctatttcccatgagtccttcatatttgcatatacgatgcaagaatgttagagagataattagaattaatttgattataaacataaagatattagtacaaaatattgatgcagaaagtaataatttattgggtagtttgtaattttaaaattatgttttaaaatggaccatgacatacttgccgtaagtgtaaagtatttctatttcttgcctttatataaggac

SEQ ID NO: 8072 - DNA, 230 bp, synthetic construct; identical to SEQ ID NO: 8071
  misc_feature 1..230: note = promoter
  source 1..230: mol_type = other DNA

SEQ ID NO: 8073 - DNA, 230 bp, synthetic construct
  misc_feature 1..230: note = promoter
  source 1..230: mol_type = other DNA
gagggcctatttcccatgagtccttcatatttgcatatacgatgcaagaatgttagagagataattagaattaatttgattataaacataaagatattagtacaaaatattgatgcagaaagtaataatttattgggtagtttgtaattttaaaattatgttttaaaatggaccatgacatacttgccgtaagtgtaaagtatttctatttcttgcctttatatatggac

SEQ ID NO: 8074 - DNA, 230 bp, synthetic construct
  misc_feature 1..230: note = promoter
  source 1..230: mol_type = other DNA
gagggcctatttcccatgagtccttcatatttgcatatacgatgcaagaatgttagagagataattagaattaatttgattataaacataaagatattagtacaaaatattgatgcagaaagtaataatttattgggtagtttgtaattttaaaattatgttttaaaatggaccatgacatacttgccgtaagtgtaaagtatttctatttcttgcctttatatatcgac

SEQ ID NO: 8075 - DNA, 230 bp, synthetic construct
  misc_feature 1..230: note = promoter
  source 1..230: mol_type = other DNA
gagggcctatttcccatgagtccttcatatttgcatatacgatgcaagaatgttagagagataattagaattaatttgattataaacataaagatattagtacaaaatattgatgcagaaagtaataatttattgggtagtttgtaattttaaaattatgttttaaaatggaccatgacatacttgccgtaagtgtaaagtatttctatttcttgcctttatatatctac

SEQ ID NO: 8076 - DNA, 230 bp, synthetic construct
  misc_feature 1..230: note = promoter
  source 1..230: mol_type = other DNA
gagggcctatttcccatgagtccttcatatttgcatatacgatgcaagaatgttagagagataattagaattaatttgattataaacataaagatattagtacaaaatattgatgcagaaagtaataatttattgggtagtttgtaattttaaaattatgttttaaaatggaccatgacatacttgccgtaagtgtaaagtatttctatttcttgcctttatatatcttc

SEQ ID NO: 8077 - DNA, 230 bp, synthetic construct; identical to SEQ ID NO: 8076
  misc_feature 1..230: note = promoter
  source 1..230: mol_type = other DNA

SEQ ID NO: 8078 - DNA, 231 bp, synthetic construct
  misc_feature 1..231: note = promoter
  source 1..231: mol_type = other DNA
gagggcctatttcccatgagtccttcatatttgcatatacgatgcaagaatgttagagagataattagaattaatttgattataaacataaagatattagtacaaaatattgatgcagaaagtaataatttattgggtagtttgtaattttaaaattatgttttaaaatggaccatgacatacttgccgtaagtgtaaagtatttctatttcttgcctttatatatcttct

SEQ ID NO: 8079 - DNA, 232 bp, synthetic construct
  misc_feature 1..232: note = promoter
  source 1..232: mol_type = other DNA
gagggcctatttcccatgagtccttcatatttgcatatacgatgcaagaatgttagagagataattagaattaatttgattataaacataaagatattagtacaaaatattgatgcagaaagtaataatttattgggtagtttgtaattttaaaattatgttttaaaatggaccatgacatacttgccgtaagtgtaaagtatttctatttcttgcctttatatatcttctg

SEQ ID NO: 8080 - DNA, 233 bp, synthetic construct
  misc_feature 1..233: note = promoter
  source 1..233: mol_type = other DNA
gagggcctatttcccatgagtccttcatatttgcatatacgatgcaagaatgttagagagataattagaattaatttgattataaacataaagatattagtacaaaatattgatgcagaaagtaataatttattgggtagtttgtaattttaaaattatgttttaaaatggaccatgacatacttgccgtaagtgtaaagtatttctatttcttgcctttatatatcttctgg

SEQ ID NO: 8081 - DNA, 234 bp, synthetic construct
  misc_feature 1..234: note = promoter
  source 1..234: mol_type = other DNA
gagggcctatttcccatgagtccttcatatttgcatatacgatgcaagaatgttagagagataattagaattaatttgattataaacataaagatattagtacaaaatattgatgcagaaagtaataatttattgggtagtttgtaattttaaaattatgttttaaaatggaccatgacatacttgccgtaagtgtaaagtatttctatttcttgcctttatatatcttctggc

SEQ ID NO: 8082 - DNA, 235 bp, synthetic construct
  misc_feature 1..235: note = promoter
  source 1..235: mol_type = other DNA
gagggcctatttcccatgagtccttcatatttgcatatacgatgcaagaatgttagagagataattagaattaatttgattataaacataaagatattagtacaaaatattgatgcagaaagtaataatttattgggtagtttgtaattttaaaattatgttttaaaatggaccatgacatacttgccgtaagtgtaaagtatttctatttcttgcctttatatatcttctggca

SEQ ID NO: 8083 - DNA, 236 bp, synthetic construct
  misc_feature 1..236: note = promoter
  source 1..236: mol_type = other DNA
gagggcctatttcccatgagtccttcatatttgcatatacgatgcaagaatgttagagagataattagaattaatttgattataaacataaagatattagtacaaaatattgatgcagaaagtaataatttattgggtagtttgtaattttaaaattatgttttaaaatggaccatgacatacttgccgtaagtgtaaagtatttctatttcttgcctttatatatcttctggcaa

SEQ ID NO: 8084 - DNA, 237 bp, synthetic construct
  misc_feature 1..237: note = promoter
  source 1..237: mol_type = other DNA
gagggcctatttcccatgagtccttcatatttgcatatacgatgcaagaatgttagagagataattagaattaatttgattataaacataaagatattagtacaaaatattgatgcagaaagtaataatttattgggtagtttgtaattttaaaattatgttttaaaatggaccatgacatacttgccgtaagtgtaaagtatttctatttcttgcctttatatatcttctggcaag

SEQ ID NO: 8085 - DNA, 238 bp, synthetic construct; identical to SEQ ID NO: 7845
  misc_feature 1..238: note = promoter
  source 1..238: mol_type = other DNA

SEQ ID NO: 8086 - DNA, 239 bp, synthetic construct; identical to SEQ ID NO: 7846
  misc_feature 1..239: note = promoter
  source 1..239: mol_type = other DNA

SEQ ID NO: 8087 - DNA, 240 bp, synthetic construct; identical to SEQ ID NO: 3608
  misc_feature 1..240: note = promoter
  source 1..240: mol_type = other DNA

SEQ ID NO: 8088 - DNA, 238 bp, synthetic construct
  misc_feature 1..238: note = promoter
  source 1..238: mol_type = other DNA
gggcctatttcccatgagtccttcatatttgcatatacgatgcaagaatgttagagagataattagaattaatttggctgtaaacataaagatattagtacaaaatattgatgcagaaagtaataatttattgggtagtttgtaattttaaaattatgttttaaaatggactatgacatacttaccgtaagtgtaaagtatttctatttcttgcctttatataccttctggcaaggac

SEQ ID NO: 8089 - DNA, 238 bp, synthetic construct; identical to SEQ ID NO: 8088
  misc_feature 1..238: note = promoter
  source 1..238: mol_type = other DNA

SEQ ID NO: 8090 - DNA, 238 bp, synthetic construct
  misc_feature 1..238: note = promoter
  source 1..238: mol_type = other DNA
gagcctatttcccatgagtccttcatatttgcatatacgatgcaagaatgttagagagataattagaattaatttggctgtaaacataaagatattagtacaaaatattgatgcagaaagtaataatttattgggtagtttgtaattttaaaattatgttttaaaatggactatgacatacttaccgtaagtgtaaagtatttctatttcttgcctttatataccttctggcaaggac

SEQ ID NO: 8091 - DNA, 238 bp, synthetic construct; identical to SEQ ID NO: 8090
  misc_feature 1..238: note = promoter
  source 1..238: mol_type = other DNA

SEQ ID NO: 8092 - DNA, 238 bp, synthetic construct
  misc_feature 1..238: note = promoter
  source 1..238: mol_type = other DNA
gaggctatttcccatgagtccttcatatttgcatatacgatgcaagaatgttagagagataattagaattaatttggctgtaaacataaagatattagtacaaaatattgatgcagaaagtaataatttattgggtagtttgtaattttaaaattatgttttaaaatggactatgacatacttaccgtaagtgtaaagtatttctatttcttgcctttatataccttctggcaaggac

SEQ ID NO: 8093 - DNA, 238 bp, synthetic construct
  misc_feature 1..238: note = promoter
  source 1..238: mol_type = other DNA
gagggtatttcccatgagtccttcatatttgcatatacgatgcaagaatgttagagagataattagaattaatttggctgtaaacataaagatattagtacaaaatattgatgcagaaagtaataatttattgggtagtttgtaattttaaaattatgttttaaaatggactatgacatacttaccgtaagtgtaaagtatttctatttcttgcctttatataccttctggcaaggac

SEQ ID NO: 8094 - DNA, 238 bp, synthetic construct
  misc_feature 1..238: note = promoter
  source 1..238: mol_type = other DNA
gagggcatttcccatgagtccttcatatttgcatatacgatgcaagaatgttagagagataattagaattaatttggctgtaaacataaagatattagtacaaaatattgatgcagaaagtaataatttattgggtagtttgtaattttaaaattatgttttaaaatggactatgacatacttaccgtaagtgtaaagtatttctatttcttgcctttatataccttctggcaaggac

SEQ ID NO: 8095 - DNA, 238 bp, synthetic construct
  misc_feature 1..238: note = promoter
  source 1..238: mol_type = other DNA
gagggcctttcccatgagtccttcatatttgcatatacgatgcaagaatgttagagagataattagaattaatttggctgtaaacataaagatattagtacaaaatattgatgcagaaagtaataatttattgggtagtttgtaattttaaaattatgttttaaaatggactatgacatacttaccgtaagtgtaaagtatttctatttcttgcctttatataccttctggcaaggac

SEQ ID NO: 8096 - DNA, 238 bp, synthetic construct; identical to SEQ ID NO: 8095
  misc_feature 1..238: note = promoter
  source 1..238: mol_type = other DNA

SEQ ID NO: 8097 - DNA, 238 bp, synthetic construct
  misc_feature 1..238: note = promoter
  source 1..238: mol_type = other DNA
gagggcctatcccatgagtccttcatatttgcatatacgatgcaagaatgttagagagataattagaattaatttggctgtaaacataaagatattagtacaaaatattgatgcagaaagtaataatttattgggtagtttgtaattttaaaattatgttttaaaatggactatgacatacttaccgtaagtgtaaagtatttctatttcttgcctttatataccttctggcaaggac

SEQ ID NO: 8098 - DNA, 238 bp, synthetic construct; identical to SEQ ID NO: 8097
  misc_feature 1..238: note = promoter
  source 1..238: mol_type = other DNA

SEQ ID NO: 8099 - DNA, 238 bp, synthetic construct
  misc_feature 1..238: note = promoter
  source 1..238: mol_type = other DNA
gagggcctattccatgagtccttcatatttgcatatacgatgcaagaatgttagagagataattagaattaatttggctgtaaacataaagatattagtacaaaatattgatgcagaaagtaataatttattgggtagtttgtaattttaaaattatgttttaaaatggactatgacatacttaccgtaagtgtaaagtatttctatttcttgcctttatataccttctggcaaggac

SEQ ID NO: 8100 - DNA, 238 bp, synthetic construct
  misc_feature 1..238: note = promoter
  source 1..238: mol_type = other DNA
gagggcctatttcatgagtccttcatatttgcatatacgatgcaagaatgttagagagataattagaattaatttggctgtaaacataaagatattagtacaaaatattgatgcagaaagtaataatttattgggtagtttgtaattttaaaattatgttttaaaatggactatgacatacttaccgtaagtgtaaagtatttctatttcttgcctttatataccttctggcaaggac

SEQ ID NO: 8101 - DNA, 238 bp, synthetic construct; identical to SEQ ID NO: 8100
  misc_feature 1..238: note = promoter
  source 1..238: mol_type = other DNA

SEQ ID NO: 8102 - DNA, 238 bp, synthetic construct
  misc_feature 1..238: note = promoter
  source 1..238: mol_type = other DNA
gagggcctatttcctgagtccttcatatttgcatatacgatgcaagaatgttagagagataattagaattaatttggctgtaaacataaagatattagtacaaaatattgatgcagaaagtaataatttattgggtagtttgtaattttaaaattatgttttaaaatggactatgacatacttaccgtaagtgtaaagtatttctatttcttgcctttatataccttctggcaaggac

SEQ ID NO: 8103 - DNA, 238 bp, synthetic construct
  misc_feature 1..238: note = promoter
  source 1..238: mol_type = other DNA
gagggcctatttcccgagtccttcatatttgcatatacgatgcaagaatgttagagagataattagaattaatttggctgtaaacataaagatattagtacaaaatattgatgcagaaagtaataatttattgggtagtttgtaattttaaaattatgttttaaaatggactatgacatacttaccgtaagtgtaaagtatttctatttcttgcctttatataccttctggcaaggac

SEQ ID NO: 8104 - DNA, 238 bp, synthetic construct
  misc_feature 1..238: note = promoter
  source 1..238: mol_type = other DNA
gagggcctatttcccaagtccttcatatttgcatatacgatgcaagaatgttagagagataattagaattaatttggctgtaaacataaagatattagtacaaaatattgatgcagaaagtaataatttattgggtagtttgtaattttaaaattatgttttaaaatggactatgacatacttaccgtaagtgtaaagtatttctatttcttgcctttatataccttctggcaaggac

SEQ ID NO: 8105 - DNA, 238 bp, synthetic construct
  misc_feature 1..238: note = promoter
  source 1..238: mol_type = other DNA
gagggcctatttcccatgtccttcatatttgcatatacgatgcaagaatgttagagagataattagaattaatttggctgtaaacataaagatattagtacaaaatattgatgcagaaagtaataatttattgggtagtttgtaattttaaaattatgttttaaaatggactatgacatacttaccgtaagtgtaaagtatttctatttcttgcctttatataccttctggcaaggac

SEQ ID NO: 8106 - DNA, 238 bp, synthetic construct; identical to SEQ ID NO: 8105
  misc_feature 1..238: note = promoter
  source 1..238: mol_type = other DNA

SEQ ID NO: 8107 - DNA, 238 bp, synthetic construct
  misc_feature 1..238: note = promoter
  source 1..238: mol_type = other DNA
gagggcctatttcccatgaccttcatatttgcatatacgatgcaagaatgttagagagataattagaattaatttggctgtaaacataaagatattagtacaaaatattgatgcagaaagtaataatttattgggtagtttgtaattttaaaattatgttttaaaatggactatgacatacttaccgtaagtgtaaagtatttctatttcttgcctttatataccttctggcaaggac

SEQ ID NO: 8108 - DNA, 238 bp, synthetic construct
  misc_feature 1..238: note = promoter
  source 1..238: mol_type = other DNA
gagggcctatttcccatgagcttcatatttgcatatacgatgcaagaatgttagagagataattagaattaatttggctgtaaacataaagatattagtacaaaatattgatgcagaaagtaataatttattgggtagtttgtaattttaaaattatgttttaaaatggactatgacatacttaccgtaagtgtaaagtatttctatttcttgcctttatataccttctggcaaggac

SEQ ID NO: 8109 - DNA, 238 bp, synthetic construct
  misc_feature 1..238: note = promoter
  source 1..238: mol_type = other DNA
gagggcctatttcccatgagtttcatatttgcatatacgatgcaagaatgttagagagataattagaattaatttggctgtaaacataaagatattagtacaaaatattgatgcagaaagtaataatttattgggtagtttgtaattttaaaattatgttttaaaatggactatgacatacttaccgtaagtgtaaagtatttctatttcttgcctttatataccttctggcaaggac

SEQ ID NO: 8110 - DNA, 238 bp, synthetic construct
  misc_feature 1..238: note = promoter
  source 1..238: mol_type = other DNA
gagggcctatttcccatgagtctcatatttgcatatacgatgcaagaatgttagagagataattagaattaatttggctgtaaacataaagatattagtacaaaatattgatgcagaaagtaataatttattgggtagtttgtaattttaaaattatgttttaaaatggactatgacatacttaccgtaagtgtaaagtatttctatttcttgcctttatataccttctggcaaggac

SEQ ID NO: 8111 - DNA, 238 bp, synthetic construct
  misc_feature 1..238: note = promoter
  source 1..238: mol_type = other DNA
gagggcctatttcccatgagtcccatatttgcatatacgatgcaagaatgttagagagataattagaattaatttggctgtaaacataaagatattagtacaaaatattgatgcagaaagtaataatttattgggtagtttgtaattttaaaattatgttttaaaatggactatgacatacttaccgtaagtgtaaagtatttctatttcttgcctttatataccttctggcaaggac

SEQ ID NO: 8112 - DNA, 238 bp, synthetic construct
  misc_feature 1..238: note = promoter
  source 1..238: mol_type = other DNA
gagggcctatttcccatgagtcctatatttgcatatacgatgcaagaatgttagagagataattagaattaatttggctgtaaacataaagatattagtacaaaatattgatgcagaaagtaataatttattgggtagtttgtaattttaaaattatgttttaaaatggactatgacatacttaccgtaagtgtaaagtatttctatttcttgcctttatataccttctggcaaggac

SEQ ID NO: 8113 - DNA, 238 bp, synthetic construct
  misc_feature 1..238: note = promoter
  source 1..238: mol_type = other DNA
gagggcctatttcccatgagtcctttatttgcatatacgatgcaagaatgttagagagataattagaattaatttggctgtaaacataaagatattagtacaaaatattgatgcagaaagtaataatttattgggtagtttgtaattttaaaattatgttttaaaatggactatgacatacttaccgtaagtgtaaagtatttctatttcttgcctttatataccttctggcaaggac

SEQ ID NO: 8114 - DNA, 238 bp, synthetic construct
  misc_feature 1..238: note = promoter
  source 1..238: mol_type = other DNA
gagggcctatttcccatgagtccttcatttgcatatacgatgcaagaatgttagagagataattagaattaatttggctgtaaacataaagatattagtacaaaatattgatgcagaaagtaataatttattgggtagtttgtaattttaaaattatgttttaaaatggactatgacatacttaccgtaagtgtaaagtatttctatttcttgcctttatataccttctggcaaggac

SEQ ID NO: 8115 - DNA, 238 bp, synthetic construct; identical to SEQ ID NO: 8114
  misc_feature 1..238: note = promoter
  source 1..238: mol_type = other DNA

SEQ ID NO: 8116 - DNA, 238 bp, synthetic construct; identical to SEQ ID NO: 8114
  misc_feature 1..238: note = promoter
  source 1..238: mol_type = other DNA

SEQ ID NO: 8117 - DNA, 238 bp, synthetic construct
  misc_feature 1..238: note = promoter
  source 1..238: mol_type = other DNA
gagggcctatttcccatgagtccttcatatgcatatacgatgcaagaatgttagagagataattagaattaatttggctgtaaacataaagatattagtacaaaatattgatgcagaaagtaataatttattgggtagtttgtaattttaaaattatgttttaaaatggactatgacatacttaccgtaagtgtaaagtatttctatttcttgcctttatataccttctggcaaggac

SEQ ID NO: 8118 - DNA, 238 bp, synthetic construct; identical to SEQ ID NO: 8117
  misc_feature 1..238: note = promoter
  source 1..238: mol_type = other DNA

SEQ ID NO: 8119 - DNA, 238 bp, synthetic construct
  misc_feature 1..238: note = promoter
  source 1..238: mol_type = other DNA
gagggcctatttcccatgagtccttcatattcatatacgatgcaagaatgttagagagataattagaattaatttggctgtaaacataaagatattagtacaaaatattgatgcagaaagtaataatttattgggtagtttgtaattttaaaattatgttttaaaatggactatgacatacttaccgtaagtgtaaagtatttctatttcttgcctttatataccttctggcaaggac

SEQ ID NO: 8120 - DNA, 238 bp, synthetic construct
  misc_feature 1..238: note = promoter
  source 1..238: mol_type = other DNA
gagggcctatttcccatgagtccttcatatttatatacgatgcaagaatgttagagagataattagaattaatttggctgtaaacataaagatattagtacaaaatattgatgcagaaagtaataatttattgggtagtttgtaattttaaaattatgttttaaaatggactatgacatacttaccgtaagtgtaaagtatttctatttcttgcctttatataccttctggcaaggac

SEQ ID NO: 8121 - DNA, 238 bp, synthetic construct
  misc_feature 1..238: note = promoter
  source 1..238: mol_type = other DNA
gagggcctatttcccatgagtccttcatatttgtatacgatgcaagaatgttagagagataattagaattaatttggctgtaaacataaagatattagtacaaaatattgatgcagaaagtaataatttattgggtagtttgtaattttaaaattatgttttaaaatggactatgacatacttaccgtaagtgtaaagtatttctatttcttgcctttatataccttctggcaaggac

SEQ ID NO: 8122 - DNA, 238 bp, synthetic construct
  misc_feature 1..238: note = promoter
  source 1..238: mol_type = other DNA
gagggcctatttcccatgagtccttcatatttgcatacgatgcaagaatgttagagagataattagaattaatttggctgtaaacataaagatattagtacaaaatattgatgcagaaagtaataatttattgggtagtttgtaattttaaaattatgttttaaaatggactatgacatacttaccgtaagtgtaaagtatttctatttcttgcctttatataccttctggcaaggac

SEQ ID NO: 8123 - DNA, 238 bp, synthetic construct; identical to SEQ ID NO: 8122
  misc_feature 1..238: note = promoter
  source 1..238: mol_type = other DNA

SEQ ID NO: 8124 - DNA, 238 bp, synthetic construct; identical to SEQ ID NO: 8122
  misc_feature 1..238: note = promoter
  source 1..238: mol_type = other DNA

SEQ ID NO: 8125 - DNA, 238 bp, synthetic construct; identical to SEQ ID NO: 8122
  misc_feature 1..238: note = promoter
  source 1..238: mol_type = other DNA

SEQ ID NO: 8126 - DNA, 238 bp, synthetic construct
  misc_feature 1..238: note = promoter
  source 1..238: mol_type = other DNA
gagggcctatttcccatgagtccttcatatttgcatatgatgcaagaatgttagagagataattagaattaatttggctgtaaacataaagatattagtacaaaatattgatgcagaaagtaataatttattgggtagtttgtaattttaaaattatgttttaaaatggactatgacatacttaccgtaagtgtaaagtatttctatttcttgcctttatataccttctggcaaggac

SEQ ID NO: 8127 - DNA, 238 bp, synthetic construct
  misc_feature 1..238: note = promoter
  source 1..238: mol_type = other DNA
gagggcctatttcccatgagtccttcatatttgcatataatgcaagaatgttagagagataattagaattaatttggctgtaaacataaagatattagtacaaaatattgatgcagaaagtaataatttattgggtagtttgtaattttaaaattatgttttaaaatggactatgacatacttaccgtaagtgtaaagtatttctatttcttgcctttatataccttctggcaaggac

SEQ ID NO: 8128 - DNA, 238 bp, synthetic construct
  misc_feature 1..238: note = promoter
  source 1..238: mol_type = other DNA
gagggcctatttcccatgagtccttcatatttgcatatactgcaagaatgttagagagataattagaattaatttggctgtaaacataaagatattagtacaaaatattgatgcagaaagtaataatttattgggtagtttgtaattttaaaattatgttttaaaatggactatgacatacttaccgtaagtgtaaagtatttctatttcttgcctttatataccttctggcaaggac

SEQ ID NO: 8129 - DNA, 238 bp, synthetic construct
  misc_feature 1..238: note = promoter
  source 1..238: mol_type = other DNA
gagggcctatttcccatgagtccttcatatttgcatatacggcaagaatgttagagagataattagaattaatttggctgtaaacataaagatattagtacaaaatattgatgcagaaagtaataatttattgggtagtttgtaattttaaaattatgttttaaaatggactatgacatacttaccgtaagtgtaaagtatttctatttcttgcctttatataccttctggcaaggac

SEQ ID NO: 8130 - DNA, 238 bp, synthetic construct
  misc_feature 1..238: note = promoter
  source 1..238: mol_type = other DNA
gagggcctatttcccatgagtccttcatatttgcatatacgacaagaatgttagagagataattagaattaatttggctgtaaacataaagatattagtacaaaatattgatgcagaaagtaataatttattgggtagtttgtaattttaaaattatgttttaaaatggactatgacatacttaccgtaagtgtaaagtatttctatttcttgcctttatataccttctggcaaggac

SEQ ID NO: 8131 - DNA, 238 bp, synthetic construct
  misc_feature 1..238: note = promoter
  source 1..238: mol_type = other DNA
gagggcctatttcccatgagtccttcatatttgcatatacgataagaatgttagagagataattagaattaatttggctgtaaacataaagatattagtacaaaatattgatgcagaaagtaataatttattgggtagtttgtaattttaaaattatgttttaaaatggactatgacatacttaccgtaagtgtaaagtatttctatttcttgcctttatataccttctggcaaggac

SEQ ID NO: 8132 - DNA, 238 bp, synthetic construct
  misc_feature 1..238: note = promoter
  source 1..238: mol_type = other DNA
gagggcctatttcccatgagtccttcatatttgcatatacgatgagaatgttagagagataattagaattaatttggctgtaaacataaagatattagtacaaaatattgatgcagaaagtaataatttattgggtagtttgtaattttaaaattatgttttaaaatggactatgacatacttaccgtaagtgtaaagtatttctatttcttgcctttatataccttctggcaaggac

SEQ ID NO: 8133 - DNA, 238 bp, synthetic construct
  misc_feature 1..238: note = promoter
  source 1..238: mol_type = other DNA
gagggcctatttcccatgagtccttcatatttgcatatacgatgcgaatgttagagagataattagaattaatttggctgtaaacataaagatattagtacaaaatattgatgcagaaagtaataatttattgggtagtttgtaattttaaaattatgttttaaaatggactatgacatacttaccgtaagtgtaaagtatttctatttcttgcctttatataccttctggcaaggac

SEQ ID NO: 8134 - DNA, 238 bp, synthetic construct
  misc_feature 1..238: note = promoter
  source 1..238: mol_type = other DNA
gagggcctatttcccatgagtccttcatatttgcatatacgatgcaaatgttagagagataattagaattaatttggctgtaaacataaagatattagtacaaaatattgatgcagaaagtaataatttattgggtagtttgtaattttaaaattatgttttaaaatggactatgacatacttaccgtaagtgtaaagtatttctatttcttgcctttatataccttctggcaaggac

SEQ ID NO: 8135 - DNA, 238 bp, synthetic construct; identical to SEQ ID NO: 8134
  misc_feature 1..238: note = promoter
  source 1..238: mol_type = other DNA

SEQ ID NO: 8136 - DNA, 238 bp, synthetic construct
  misc_feature 1..238: note = promoter
  source 1..238: mol_type = other DNA
gagggcctatttcccatgagtccttcatatttgcatatacgatgcaagtgttagagagataattagaattaatttggctgtaaacataaagatattagtacaaaatattgatgcagaaagtaataatttattgggtagtttgtaattttaaaattatgttttaaaatggactatgacatacttaccgtaagtgtaaagtatttctatttcttgcctttatataccttctggcaaggac

SEQ ID NO: 8137 - DNA, 238 bp, synthetic construct
  misc_feature 1..238: note = promoter
  source 1..238: mol_type = other DNA
gagggcctatttcccatgagtccttcatatttgcatatacgatgcaagagttagagagataattagaattaatttggctgtaaacataaagatattagtacaaaatattgatgcagaaagtaataatttattgggtagtttgtaattttaaaattatgttttaaaatggactatgacatacttaccgtaagtgtaaagtatttctatttcttgcctttatataccttctggcaaggac

SEQ ID NO: 8138 - DNA, 238 bp, synthetic construct
  misc_feature 1..238: note = promoter
  source 1..238: mol_type = other DNA
gagggcctatttcccatgagtccttcatatttgcatatacgatgcaagaattagagagataattagaattaatttggctgtaaacataaagatattagtacaaaatattgatgcagaaagtaataatttattgggtagtttgtaattttaaaattatgttttaaaatggactatgacatacttaccgtaagtgtaaagtatttctatttcttgcctttatataccttctggcaaggac

SEQ ID NO: 8139 - DNA, 238 bp, synthetic construct; identical to SEQ ID NO: 8138
  misc_feature 1..238: note = promoter
  source 1..238: mol_type = other DNA

SEQ ID NO: 8140 - DNA, 238 bp, synthetic construct
  misc_feature 1..238: note = promoter
  source 1..238: mol_type = other DNA
gagggcctatttcccatgagtccttcatatttgcatatacgatgcaagaatgagagagataattagaattaatttggctgtaaacataaagatattagtacaaaatattgatgcagaaagtaataatttattgggtagtttgtaattttaaaattatgttttaaaatggactatgacatacttaccgtaagtgtaaagtatttctatttcttgcctttatataccttctggcaaggac

SEQ ID NO: 8141 - DNA, 238 bp, synthetic construct
  misc_feature 1..238: note = promoter
  source 1..238: mol_type = other DNA
gagggcctatttcccatgagtccttcatatttgcatatacgatgcaagaatgtgagagataattagaattaatttggctgtaaacataaagatattagtacaaaatattgatgcagaaagtaataatttattgggtagtttgtaattttaaaattatgttttaaaatggactatgacatacttaccgtaagtgtaaagtatttctatttcttgcctttatataccttctggcaaggac

SEQ ID NO: 8142 - DNA, 238 bp, synthetic construct
  misc_feature 1..238: note = promoter
  source 1..238: mol_type = other DNA
gagggcctatttcccatgagtccttcatatttgcatatacgatgcaagaatgttagagataattagaattaatttggctgtaaacataaagatattagtacaaaatattgatgcagaaagtaataatttattgggtagtttgtaattttaaaattatgttttaaaatggactatgacatacttaccgtaagtgtaaagtatttctatttcttgcctttatataccttctggcaaggac

SEQ ID NO: 8143 - DNA, 238 bp, synthetic construct; identical to SEQ ID NO: 8142
  misc_feature 1..238: note = promoter
  source 1..238: mol_type = other DNA

SEQ ID NO: 8144 - DNA, 238 bp, synthetic construct; identical to SEQ ID NO: 8142
  misc_feature 1..238: note = promoter
  source 1..238: mol_type = other DNA

SEQ ID NO: 8145 - DNA, 238 bp, synthetic construct; identical to SEQ ID NO: 8142
  misc_feature 1..238: note = promoter
  source 1..238: mol_type = other DNA

SEQ ID NO: 8146 - DNA, 238 bp, synthetic construct; identical to SEQ ID NO: 8142
  misc_feature 1..238: note = promoter
  source 1..238: mol_type = other DNA

SEQ ID NO: 8147 - DNA, 238 bp, synthetic construct; identical to SEQ ID NO: 8142
  misc_feature 1..238: note = promoter
  source 1..238: mol_type = other DNA

SEQ ID NO: 8148 - DNA, 238 bp, synthetic construct
  misc_feature 1..238: note = promoter
  source 1..238: mol_type = other DNA
gagggcctatttcccatgagtccttcatatttgcatatacgatgcaagaatgttagagagaattagaattaatttggctgtaaacataaagatattagtacaaaatattgatgcagaaagtaataatttattgggtagtttgtaattttaaaattatgttttaaaatggactatgacatacttaccgtaagtgtaaagtatttctatttcttgcctttatataccttctggcaaggac

SEQ ID NO: 8149 - DNA, 238 bp, synthetic construct; identical to SEQ ID NO: 8148
  misc_feature 1..238: note = promoter
  source 1..238: mol_type = other DNA

SEQ ID NO: 8150 - DNA, 238 bp, synthetic construct
  misc_feature 1..238: note = promoter
  source 1..238: mol_type = other DNA
gagggcctatttcccatgagtccttcatatttgcatatacgatgcaagaatgttagagagatttagaattaatttggctgtaaacataaagatattagtacaaaatattgatgcagaaagtaataatttattgggtagtttgtaattttaaaattatgttttaaaatggactatgacatacttaccgtaagtgtaaagtatttctatttcttgcctttatataccttctggcaaggac

SEQ ID NO: 8151 - DNA, 238 bp, synthetic construct
  misc_feature 1..238: note = promoter
  source 1..238: mol_type = other DNA
gagggcctatttcccatgagtccttcatatttgcatatacgatgcaagaatgttagagagatatagaattaatttggctgtaaacataaagatattagtacaaaatattgatgcagaaagtaataatttattgggtagtttgtaattttaaaattatgttttaaaatggactatgacatacttaccgtaagtgtaaagtatttctatttcttgcctttatataccttctggcaaggac

SEQ ID NO: 8152 - DNA, 238 bp, synthetic construct
  misc_feature 1..238: note = promoter
  source 1..238: mol_type = other DNA
gagggcctatttcccatgagtccttcatatttgcatatacgatgcaagaatgttagagagataaagaattaatttggctgtaaacataaagatattagtacaaaatattgatgcagaaagtaataatttattgggtagtttgtaattttaaaattatgttttaaaatggactatgacatacttaccgtaagtgtaaagtatttctatttcttgcctttatataccttctggcaaggac

SEQ ID NO: 8153 - DNA, 238 bp, synthetic construct
  misc_feature 1..238: note = promoter
  source 1..238: mol_type = other DNA
gagggcctatttcccatgagtccttcatatttgcatatacgatgcaagaatgttagagagataatgaattaatttggctgtaaacataaagatattagtacaaaatattgatgcagaaagtaataatttattgggtagtttgtaattttaaaattatgttttaaaatggactatgacatacttaccgtaagtgtaaagtatttctatttcttgcctttatataccttctggcaaggac

SEQ ID NO: 8154 - DNA, 238 bp, synthetic construct
  misc_feature 1..238: note = promoter
  source 1..238: mol_type = other DNA
gagggcctatttcccatgagtccttcatatttgcatatacgatgcaagaatgttagagagataattaattaatttggctgtaaacataaagatattagtacaaaatattgatgcagaaagtaataatttattgggtagtttgtaattttaaaattatgttttaaaatggactatgacatacttaccgtaagtgtaaagtatttctatttcttgcctttatataccttctggcaaggac

SEQ ID NO: 8155 - DNA, 238 bp, synthetic construct; identical to SEQ ID NO: 8154
  misc_feature 1..238: note = promoter
  source 1..238: mol_type = other DNA

SEQ ID NO: 8156 - DNA, 238 bp, synthetic construct
  misc_feature 1..238: note = promoter
  source 1..238: mol_type = other DNA
gagggcctatttcccatgagtccttcatatttgcatatacgatgcaagaatgttagagagataattagttaatttggctgtaaacataaagatattagtacaaaatattgatgcagaaagtaataatttattgggtagtttgtaattttaaaattatgttttaaaatggactatgacatacttaccgtaagtgtaaagtatttctatttcttgcctttatataccttctggcaaggac

SEQ ID NO: 8157 - DNA, 238 bp, synthetic construct
  misc_feature 1..238: note = promoter
  source 1..238: mol_type = other DNA
gagggcctatttcccatgagtccttcatatttgcatatacgatgcaagaatgttagagagataattagataatttggctgtaaacataaagatattagtacaaaatattgatgcagaaagtaataatttattgggtagtttgtaattttaaaattatgttttaaaatggactatgacatacttaccgtaagtgtaaagtatttctatttcttgcctttatataccttctggcaaggac

SEQ ID NO: 8158 - DNA, 238 bp, synthetic construct
  misc_feature 1..238: note = promoter
  source 1..238: mol_type = other DNA
gagggcctatttcccatgagtccttcatatttgcatatacgatgcaagaatgttagagagataattagaaaatttggctgtaaacataaagatattagtacaaaatattgatgcagaaagtaataatttattgggtagtttgtaattttaaaattatgttttaaaatggactatgacatacttaccgtaagtgtaaagtatttctatttcttgcctttatataccttctggcaaggac

SEQ ID NO: 8159 - DNA, 238 bp, synthetic construct
  misc_feature 1..238: note = promoter
  source 1..238: mol_type = other DNA
gagggcctatttcccatgagtccttcatatttgcatatacgatgcaagaatgttagagagataattagaatatttggctgtaaacataaagatattagtacaaaatattgatgcagaaagtaataatttattgggtagtttgtaattttaaaattatgttttaaaatggactatgacatacttaccgtaagtgtaaagtatttctatttcttgcctttatataccttctggcaaggac

SEQ ID NO: 8160 - DNA, 238 bp, synthetic construct
  misc_feature 1..238: note = promoter
  source 1..238: mol_type = other DNA
gagggcctatttcccatgagtccttcatatttgcatatacgatgcaagaatgttagagagataattagaatttttggctgtaaacataaagatattagtacaaaatattgatgcagaaagtaataatttattgggtagtttgtaattttaaaattatgttttaaaatggactatgacatacttaccgtaagtgtaaagtatttctatttcttgcctttatataccttctggcaaggac

SEQ ID NO: 8161 - DNA, 238 bp, synthetic construct
  misc_feature 1..238: note = promoter
  source 1..238: mol_type = other DNA
gagggcctatttcccatgagtccttcatatttgcatatacgatgcaagaatgttagagagataattagaattattggctgtaaacataaagatattagtacaaaatattgatgcagaaagtaataatttattgggtagtttgtaattttaaaattatgttttaaaatggactatgacatacttaccgtaagtgtaaagtatttctatttcttgcctttatataccttctggcaaggac

SEQ ID NO: 8162 - DNA, 238 bp, synthetic construct
  misc_feature 1..238: note = promoter
  source 1..238: mol_type = other DNA
gagggcctatttcccatgagtccttcatatttgcatatacgatgcaagaatgttagagagataattagaattaatggctgtaaacataaagatattagtacaaaatattgatgcagaaagtaataatttattgggtagtttgtaattttaaaattatgttttaaaatggactatgacatacttaccgtaagtgtaaagtatttctatttcttgcctttatataccttctggcaaggac

SEQ ID NO: 8163 - DNA, 238 bp, synthetic construct; identical to SEQ ID NO: 8162
  misc_feature 1..238: note = promoter
  source 1..238: mol_type = other DNA

SEQ ID NO: 8164 - DNA, 238 bp, synthetic construct
  misc_feature 1..238: note = promoter
  source 1..238: mol_type = other DNA
gagggcctatttcccatgagtccttcatatttgcatatacgatgcaagaatgttagagagataattagaattaattgctgtaaacataaagatattagtacaaaatattgatgcagaaagtaataatttattgggtagtttgtaattttaaaattatgttttaaaatggactatgacatacttaccgtaagtgtaaagtatttctatttcttgcctttatataccttctggcaaggac

SEQ ID NO: 8165 - DNA, 238 bp, synthetic construct
  misc_feature 1..238: note = promoter
  source 1..238: mol_type = other DNA
gagggcctatttcccatgagtccttcatatttgcatatacgatgcaagaatgttagagagataattagaattaatttctgtaaacataaagatattagtacaaaatattgatgcagaaagtaataatttattgggtagtttgtaattttaaaattatgttttaaaatggactatgacatacttaccgtaagtgtaaagtatttctatttcttgcctttatataccttctggcaaggac

SEQ ID NO: 8166 - DNA, 238 bp, synthetic construct
  misc_feature 1..238: note = promoter
  source 1..238: mol_type = other DNA
gagggcctatttcccatgagtccttcatatttgcatatacgatgcaagaatgttagagagataattagaattaatttgtgtaaacataaagatattagtacaaaatattgatgcagaaagtaataatttattgggtagtttgtaattttaaaattatgttttaaaatggactatgacatacttaccgtaagtgtaaagtatttctatttcttgcctttatataccttctggcaaggac

SEQ ID NO: 8167 - DNA, 238 bp, synthetic construct
  misc_feature 1..238: note = promoter
  source 1..238: mol_type = other DNA
gagggcctatttcccatgagtccttcatatttgcatatacgatgcaagaatgttagagagataattagaattaatttgggtaaacataaagatattagtacaaaatattgatgcagaaagtaataatttattgggtagtttgtaattttaaaattatgttttaaaatggactatgacatacttaccgtaagtgtaaagtatttctatttcttgcctttatataccttctggcaaggac

SEQ ID NO: 8168 - DNA, 238 bp, synthetic construct
  misc_feature 1..238: note = promoter
  source 1..238: mol_type = other DNA
gagggcctatttcccatgagtccttcatatttgcatatacgatgcaagaatgttagagagataattagaattaatttggctaaacataaagatattagtacaaaatattgatgcagaaagtaataatttattgggtagtttgtaattttaaaattatgttttaaaatggactatgacatacttaccgtaagtgtaaagtatttctatttcttgcctttatataccttctggcaaggac

SEQ ID NO: 8169 - DNA, 238 bp, synthetic construct; identical to SEQ ID NO: 8168
  misc_feature 1..238: note = promoter
  source 1..238: mol_type = other DNA

SEQ ID NO: 8170 - DNA, 238 bp, synthetic construct
  misc_feature 1..238: note = promoter
  source 1..238: mol_type = other DNA
gagggcctatttcccatgagtccttcatatttgcatatacgatgcaagaatgttagagagataattagaattaatttggctgaacataaagatattagtacaaaatattgatgcagaaagtaataatttattgggtagtttgtaattttaaaattatgttttaaaatggactatgacatacttaccgtaagtgtaaagtatttctatttcttgcctttatataccttctggcaaggac

SEQ ID NO: 8171 - DNA, 238 bp, synthetic construct
  misc_feature 1..238: note = promoter
  source 1..238: mol_type = other DNA
gagggcctatttcccatgagtccttcatatttgcatatacgatgcaagaatgttagagagataattagaattaatttggctgtacataaagatattagtacaaaatattgatgcagaaagtaataatttattgggtagtttgtaattttaaaattatgttttaaaatggactatgacatacttaccgtaagtgtaaagtatttctatttcttgcctttatataccttctggcaaggac

SEQ ID NO: 8172 - DNA, 238 bp, synthetic construct; identical to SEQ ID NO: 8171
  misc_feature 1..238: note = promoter
  source 1..238: mol_type = other DNA

SEQ ID NO: 8173 - DNA, 238 bp, synthetic construct
  misc_feature 1..238: note = promoter
  source 1..238: mol_type = other DNA
gagggcctatttcccatgagtccttcatatttgcatatacgatgcaagaatgttagagagataattagaattaatttggctgtaaataaagatattagtacaaaatattgatgcagaaagtaataatttattgggtagtttgtaattttaaaattatgttttaaaatggactatgacatacttaccgtaagtgtaaagtatttctatttcttgcctttatataccttctggcaaggac

SEQ ID NO: 8174 - DNA, 238 bp, synthetic construct; identical to SEQ ID NO: 8173
  misc_feature 1..238: note = promoter
  source 1..238: mol_type = other DNA

SEQ ID NO: 8175 - DNA, 238 bp, synthetic construct
  misc_feature 1..238: note = promoter
  source 1..238: mol_type = other DNA
gagggcctatttcccatgagtccttcatatttgcatatacgatgcaagaatgttagagagataattagaattaatttggctgtaaacaaagatattagtacaaaatattgatgcagaaagtaataatttattgggtagtttgtaattttaaaattatgttttaaaatggactatgacatacttaccgtaagtgtaaagtatttctatttcttgcctttatataccttctggcaaggac

SEQ ID NO: 8176 - DNA, 238 bp, synthetic construct; identical to SEQ ID NO: 8175
  misc_feature 1..238: note = promoter
  source 1..238: mol_type = other DNA

SEQ ID NO: 8177 - DNA, 238 bp, synthetic construct
  misc_feature 1..238: note = promoter
  source 1..238: mol_type = other DNA
gagggcctatttcccatgagtccttcatatttgcatatacgatgcaagaatgttagagagataattagaattaatttggctgtaaacatagatattagtacaaaatattgatgcagaaagtaataatttattgggtagtttgtaattttaaaattatgttttaaaatggactatgacatacttaccgtaagtgtaaagtatttctatttcttgcctttatataccttctggcaaggac

SEQ ID NO: 8178 - DNA, 238 bp, synthetic construct; identical to SEQ ID NO: 8177
  misc_feature 1..238: note = promoter
  source 1..238: mol_type = other DNA

SEQ ID NO: 8179 - DNA, 238 bp, synthetic construct
  misc_feature 1..238: note = promoter
  source 1..238: mol_type = other DNA
gagggcctatttcccatgagtccttcatatttgcatatacgatgcaagaatgttagagagataattagaattaatttggctgtaaacataaatattagtacaaaatattgatgcagaaagtaataatttattgggtagtttgtaattttaaaattatgttttaaaatggactatgacatacttaccgtaagtgtaaagtatttctatttcttgcctttatataccttctggcaaggac

SEQ ID NO: 8180 - DNA, 238 bp, synthetic construct; identical to SEQ ID NO: 8179
  misc_feature 1..238: note = promoter
  source 1..238: mol_type = other DNA

SEQ ID NO: 8181 - DNA, 238 bp, synthetic construct
  misc_feature 1..238: note = promoter
  source 1..238: mol_type = other DNA
gagggcctatttcccatgagtccttcatatttgcatatacgatgcaagaatgttagagagataattagaattaatttggctgtaaacataaagattagtacaaaatattgatgcagaaagtaataatttattgggtagtttgtaattttaaaattatgttttaaaatggactatgacatacttaccgtaagtgtaaagtatttctatttcttgcctttatataccttctggcaaggac

SEQ ID NO: 8182 - DNA, 238 bp, synthetic construct; identical to SEQ ID NO: 8181
  misc_feature 1..238: note = promoter
  source 1..238: mol_type = other DNA

SEQ ID NO: 8183 - DNA, 238 bp, synthetic construct; identical to SEQ ID NO: 8181
  misc_feature 1..238: note = promoter
  source 1..238: mol_type = other DNA

SEQ ID NO: 8184 - DNA, 238 bp, synthetic construct
  misc_feature 1..238: note = promoter
  source 1..238: mol_type = other DNA
gagggcctatttcccatgagtccttcatatttgcatatacgatgcaagaatgttagagagataattagaattaatttggctgtaaacataaagataagtacaaaatattgatgcagaaagtaataatttattgggtagtttgtaattttaaaattatgttttaaaatggactatgacatacttaccgtaagtgtaaagtatttctatttcttgcctttatataccttctggcaaggac

SEQ ID NO: 8185 - DNA, 238 bp, synthetic construct
  misc_feature 1..238: note = promoter
  source 1..238: mol_type = other DNA
gagggcctatttcccatgagtccttcatatttgcatatacgatgcaagaatgttagagagataattagaattaatttggctgtaaacataaagatatgtacaaaatattgatgcagaaagtaataatttattgggtagtttgtaattttaaaattatgttttaaaatggactatgacatacttaccgtaagtgtaaagtatttctatttcttgcctttatataccttctggcaaggac

SEQ ID NO: 8186 - DNA, 238 bp, synthetic construct
  misc_feature 1..238: note = promoter
  source 1..238: mol_type = other DNA
gagggcctatttcccatgagtccttcatatttgcatatacgatgcaagaatgttagagagataattagaattaatttggctgtaaacataaagatatttacaaaatattgatgcagaaagtaataatttattgggtagtttgtaattttaaaattatgttttaaaatggactatgacatacttaccgtaagtgtaaagtatttctatttcttgcctttatataccttctggcaaggac

SEQ ID NO: 8187 - DNA, 238 bp, synthetic construct
  misc_feature 1..238: note = promoter
  source 1..238: mol_type = other DNA
gagggcctatttcccatgagtccttcatatttgcatatacgatgcaagaatgttagagagataattagaattaatttggctgtaaacataaagatattaacaaaatattgatgcagaaagtaataatttattgggtagtttgtaattttaaaattatgttttaaaatggactatgacatacttaccgtaagtgtaaagtatttctatttcttgcctttatataccttctggcaaggac

SEQ ID NO: 8188 - DNA, 238 bp, synthetic construct
  misc_feature 1..238: note = promoter
  source 1..238: mol_type = other DNA
gagggcctatttcccatgagtccttcatatttgcatatacgatgcaagaatgttagagagataattagaattaatttggctgtaaacataaagatattagcaaaatattgatgcagaaagtaataatttattgggtagtttgtaattttaaaattatgttttaaaatggactatgacatacttaccgtaagtgtaaagtatttctatttcttgcctttatataccttctggcaaggac

SEQ ID NO: 8189 - DNA, 238 bp, synthetic construct
  misc_feature 1..238: note = promoter
  source 1..238: mol_type = other DNA
gagggcctatttcccatgagtccttcatatttgcatatacgatgcaagaatgttagagagataattagaattaatttggctgtaaacataaagatattagtaaaatattgatgcagaaagtaataatttattgggtagtttgtaattttaaaattatgttttaaaatggactatgacatacttaccgtaagtgtaaagtatttctatttcttgcctttatataccttctggcaaggac

SEQ ID NO: 8190 - DNA, 238 bp, synthetic construct; identical to SEQ ID NO: 8189
  misc_feature 1..238: note = promoter
  source 1..238: mol_type = other DNA

SEQ ID NO: 8191 - DNA, 238 bp, synthetic construct
  misc_feature 1..238: note = promoter
  source 1..238: mol_type = other DNA
gagggcctatttcccatgagtccttcatatttgcatatacgatgcaagaatgttagagagataattagaattaatttggctgtaaacataaagatattagtacaatattgatgcagaaagtaataatttattgggtagtttgtaattttaaaattatgttttaaaatggactatgacatacttaccgtaagtgtaaagtatttctatttcttgcctttatataccttctggcaaggac

SEQ ID NO: 8192 - DNA, 238 bp, synthetic construct; identical to SEQ ID NO: 8191
  misc_feature 1..238: note = promoter
  source 1..238: mol_type = other DNA

SEQ ID NO: 8193 - DNA, 238 bp, synthetic construct; identical to SEQ ID NO: 8191
  misc_feature 1..238: note = promoter
  source 1..238: mol_type = other DNA

SEQ ID NO: 8194 - DNA, 238 bp, synthetic construct
  misc_feature 1..238: note = promoter
  source 1..238: mol_type = other DNA
gagggcctatttcccatgagtccttcatatttgcatatacgatgcaagaatgttagagagataattagaattaatttggctgtaaacataaagatattagtacaaaattgatgcagaaagtaataatttattgggtagtttgtaattttaaaattatgttttaaaatggactatgacatacttaccgtaagtgtaaagtatttctatttcttgcctttatataccttctggcaaggac

SEQ ID NO: 8195 - DNA, 238 bp, synthetic construct; identical to SEQ ID NO: 8194
  misc_feature 1..238: note = promoter
  source 1..238: mol_type = other DNA

SEQ ID NO: 8196 - DNA, 238 bp, synthetic construct; identical to SEQ ID NO: 8194
  misc_feature 1..238: note = promoter
  source 1..238: mol_type = other DNA

SEQ ID NO: 8197 - DNA, 238 bp, synthetic construct
  misc_feature 1..238: note = promoter
  source 1..238: mol_type = other DNA
gagggcctatttcccatgagtccttcatatttgcatatacgatgcaagaatgttagagagataattagaattaatttggctgtaaacataaagatattagtacaaaatagatgcagaaagtaataatttattgggtagtttgtaattttaaaattatgttttaaaatggactatgacatacttaccgtaagtgtaaagtatttctatttcttgcctttatataccttctggcaaggac

SEQ ID NO: 8198 - DNA, 238 bp, synthetic construct
  misc_feature 1..238: note = promoter
  source 1..238: mol_type = other DNA
gagggcctatttcccatgagtccttcatatttgcatatacgatgcaagaatgttagagagataattagaattaatttggctgtaaacataaagatattagtacaaaatatatgcagaaagtaataatttattgggtagtttgtaattttaaaattatgttttaaaatggactatgacatacttaccgtaagtgtaaagtatttctatttcttgcctttatataccttctggcaaggac

SEQ ID NO: 8199 - DNA, 238 bp, synthetic construct
  misc_feature 1..238: note = promoter
  source 1..238: mol_type = other DNA
gagggcctatttcccatgagtccttcatatttgcatatacgatgcaagaatgttagagagataattagaattaatttggctgtaaacataaagatattagtacaaaatatttgcagaaagtaataatttattgggtagtttgtaattttaaaattatgttttaaaatggactatgacatacttaccgtaagtgtaaagtatttctatttcttgcctttatataccttctggcaaggac

SEQ ID NO: 8200 - DNA, 238 bp, synthetic construct
  misc_feature 1..238: note = promoter
  source 1..238: mol_type = other DNA
gagggcctatttcccatgagtccttcatatttgcatatacgatgcaagaatgttagagagataattagaattaatttggctgtaaacataaagatattagtacaaaatattggcagaaagtaataatttattgggtagtttgtaattttaaaattatgttttaaaatggactatgacatacttaccgtaagtgtaaagtatttctatttcttgcctttatataccttctggcaaggac

SEQ ID NO: 8201 - DNA, 238 bp, synthetic construct
  misc_feature 1..238: note = promoter
  source 1..238: mol_type = other DNA
gagggcctatttcccatgagtccttcatatttgcatatacgatgcaagaatgttagagagataattagaattaatttggctgtaaacataaagatattagtacaaaatattgacagaaagtaataatttattgggtagtttgtaattttaaaattatgttttaaaatggactatgacatacttaccgtaagtgtaaagtatttctatttcttgcctttatataccttctggcaaggac

SEQ ID NO: 8202 - DNA, 238 bp, synthetic construct
  misc_feature 1..238: note = promoter
  source 1..238: mol_type = other DNA
gagggcctatttcccatgagtccttcatatttgcatatacgatgcaagaatgttagagagataattagaattaatttggctgtaaacataaagatattagtacaaaatattgatagaaagtaataatttattgggtagtttgtaattttaaaattatgttttaaaatggactatgacatacttaccgtaagtgtaaagtatttctatttcttgcctttatataccttctggcaaggac

SEQ ID NO: 8203 - DNA, 238 bp, synthetic construct
  misc_feature 1..238: note = promoter
  source 1..238: mol_type = other DNA
gagggcctatttcccatgagtccttcatatttgcatatacgatgcaagaatgttagagagataattagaattaatttggctgtaaacataaagatattagtacaaaatattgatggaaagtaataatttattgggtagtttgtaattttaaaattatgttttaaaatggactatgacatacttaccgtaagtgtaaagtatttctatttcttgcctttatataccttctggcaaggac

SEQ ID NO: 8204 - DNA, 238 bp, synthetic construct
  misc_feature 1..238: note = promoter
  source 1..238: mol_type = other DNA
gagggcctatttcccatgagtccttcatatttgcatatacgatgcaagaatgttagagagataattagaattaatttggctgtaaacataaagatattagtacaaaatattgatgcaaagtaataatttattgggtagtttgtaattttaaaattatgttttaaaatggactatgacatacttaccgtaagtgtaaagtatttctatttcttgcctttatataccttctggcaaggac

SEQ ID NO: 8205 - DNA, 238 bp, synthetic construct; identical to SEQ ID NO: 8204
  misc_feature 1..238: note = promoter
  source 1..238: mol_type = other DNA

SEQ ID NO: 8206 - DNA, 238 bp, synthetic construct
  misc_feature 1..238: note = promoter
  source 1..238: mol_type = other DNA
gagggcctatttcccatgagtccttcatatttgcatatacgatgcaagaatgttagagagataattagaattaatttggctgtaaacataaagatattagtacaaaatattgatgcagagtaataatttattgggtagtttgtaattttaaaattatgttttaaaatggactatgacatacttaccgtaagtgtaaagtatttctatttcttgcctttatataccttctggcaaggac

SEQ ID NO: 8207 - DNA, 238 bp, synthetic construct; identical to SEQ ID NO: 8206
  misc_feature 1..238: note = promoter
  source 1..238: mol_type = other DNA

SEQ ID NO: 8208 - DNA, 238 bp, synthetic construct
  misc_feature 1..238: note = promoter
  source 1..238: mol_type = other DNA
gagggcctatttcccatgagtccttcatatttgcatatacgatgcaagaatgttagagagataattagaattaatttggctgtaaacataaagatattagtacaaaatattgatgcagaataataatttattgggtagtttgtaattttaaaattatgttttaaaatggactatgacatacttaccgtaagtgtaaagtatttctatttcttgcctttatataccttctggcaaggac

SEQ ID NO: 8209 - DNA, 238 bp, synthetic construct
  misc_feature 1..238: note = promoter
  source 1..238: mol_type = other DNA
gagggcctatttcccatgagtccttcatatttgcatatacgatgcaagaatgttagagagataattagaattaatttggctgtaaacataaagatattagtacaaaatattgatgcagaaaaataatttattgggtagtttgtaattttaaaattatgttttaaaatggactatgacatacttaccgtaagtgtaaagtatttctatttcttgcctttatataccttctggcaaggac

SEQ ID NO: 8210 - DNA, 238 bp, synthetic construct
  misc_feature 1..238: note = promoter
  source 1..238: mol_type = other DNA
gagggcctatttcccatgagtccttcatatttgcatatacgatgcaagaatgttagagagataattagaattaatttggctgtaaacataaagatattagtacaaaatattgatgcagaaagataatttattgggtagtttgtaattttaaaattatgttttaaaatggactatgacatacttaccgtaagtgtaaagtatttctatttcttgcctttatataccttctggcaaggac

SEQ ID NO: 8211 - DNA, 238 bp, synthetic construct
  misc_feature 1..238: note = promoter
  source 1..238: mol_type = other DNA
gagggcctatttcccatgagtccttcatatttgcatatacgatgcaagaatgttagagagataattagaattaatttggctgtaaacataaagatattagtacaaaatattgatgcagaaagttaatttattgggtagtttgtaattttaaaattatgttttaaaatggactatgacatacttaccgtaagtgtaaagtatttctatttcttgcctttatataccttctggcaaggac

SEQ ID NO: 8212 - DNA, 238 bp, synthetic construct
  misc_feature 1..238: note = promoter
  source 1..238: mol_type = other DNA
gagggcctatttcccatgagtccttcatatttgcatatacgatgcaagaatgttagagagataattagaattaatttggctgtaaacataaagatattagtacaaaatattgatgcagaaagtaaatttattgggtagtttgtaattttaaaattatgttttaaaatggactatgacatacttaccgtaagtgtaaagtatttctatttcttgcctttatataccttctggcaaggac

SEQ ID NO: 8213 - DNA, 238 bp, synthetic construct; identical to SEQ ID NO: 8212
  misc_feature 1..238: note = promoter
  source 1..238: mol_type = other DNA

SEQ ID NO: 8214 - DNA, 238 bp, synthetic construct
  misc_feature 1..238: note = promoter
  source 1..238: mol_type = other DNA
gagggcctatttcccatgagtccttcatatttgcatatacgatgcaagaatgttagagagataattagaattaatttggctgtaaacataaagatattagtacaaaatattgatgcagaaagtaattttattgggtagtttgtaattttaaaattatgttttaaaatggactatgacatacttaccgtaagtgtaaagtatttctatttcttgcctttatataccttctggcaaggac

SEQ ID NO: 8215 - DNA, 238 bp, synthetic construct
  misc_feature 1..238: note = promoter
  source 1..238: mol_type = other DNA
gagggcctatttcccatgagtccttcatatttgcatatacgatgcaagaatgttagagagataattagaattaatttggctgtaaacataaagatattagtacaaaatattgatgcagaaagtaatattattgggtagtttgtaattttaaaattatgttttaaaatggactatgacatacttaccgtaagtgtaaagtatttctatttcttgcctttatataccttctggcaaggac

SEQ ID NO: 8216 - DNA, 238 bp, synthetic construct
  misc_feature 1..238: note = promoter
  source 1..238: mol_type = other DNA
gagggcctatttcccatgagtccttcatatttgcatatacgatgcaagaatgttagagagataattagaattaatttggctgtaaacataaagatattagtacaaaatattgatgcagaaagtaataatattgggtagtttgtaattttaaaattatgttttaaaatggactatgacatacttaccgtaagtgtaaagtatttctatttcttgcctttatataccttctggcaaggac

SEQ ID NO: 8217 - DNA, 238 bp, synthetic construct; identical to SEQ ID NO: 8216
  misc_feature 1..238: note = promoter
  source 1..238: mol_type = other DNA

SEQ ID NO: 8218 - DNA, 238 bp, synthetic construct
  misc_feature 1..238: note = promoter
  source 1..238: mol_type = other DNA
gagggcctatttcccatgagtccttcatatttgcatatacgatgcaagaatgttagagagataattagaattaatttggctgtaaacataaagatattagtacaaaatattgatgcagaaagtaataattttgggtagtttgtaattttaaaattatgttttaaaatggactatgacatacttaccgtaagtgtaaagtatttctatttcttgcctttatataccttctggcaaggac

SEQ ID NO: 8219 - DNA, 238 bp, synthetic construct; identical to SEQ ID NO: 8218
  misc_feature 1..238: note = promoter
  source 1..238: mol_type = other DNA

SEQ ID NO: 8220 - DNA, 238 bp, synthetic construct
  misc_feature 1..238: note = promoter
  source 1..238: mol_type = other DNA
gagggcctatttcccatgagtccttcatatttgcatatacgatgcaagaatgttagagagataattagaattaatttggctgtaaacataaagatattagtacaaaatattgatgcagaaagtaataatttagggtagtttgtaattttaaaattatgttttaaaatggactatgacatacttaccgtaagtgtaaagtatttctatttcttgcctttatataccttctggcaaggac

SEQ ID NO: 8221 - DNA, 238 bp, synthetic construct
  misc_feature 1..238: note = promoter
  source 1..238: mol_type = other DNA
gagggcctatttcccatgagtccttcatatttgcatatacgatgcaagaatgttagagagataattagaattaatttggctgtaaacataaagatattagtacaaaatattgatgcagaaagtaataatttatggtagtttgtaattttaaaattatgttttaaaatggactatgacatacttaccgtaagtgtaaagtatttctatttcttgcctttatataccttctggcaaggac

SEQ ID NO: 8222 - DNA, 238 bp, synthetic construct
  misc_feature 1..238: note = promoter
  source 1..238: mol_type = other DNA
gagggcctatttcccatgagtccttcatatttgcatatacgatgcaagaatgttagagagataattagaattaatttggctgtaaacataaagatattagtacaaaatattgatgcagaaagtaataatttattgtagtttgtaattttaaaattatgttttaaaatggactatgacatacttaccgtaagtgtaaagtatttctatttcttgcctttatataccttctggcaaggac

SEQ ID NO: 8223 - DNA, 238 bp, synthetic construct; identical to SEQ ID NO: 8222
  misc_feature 1..238: note = promoter
  source 1..238: mol_type = other DNA

SEQ ID NO: 8224 - DNA, 238 bp, synthetic construct
  misc_feature 1..238: note = promoter
  source 1..238: mol_type = other DNA
gagggcctatttcccatgagtccttcatatttgcatatacgatgcaagaatgttagagagataattagaattaatttggctgtaaacataaagatattagtacaaaatattgatgcagaaagtaataatttattggagtttgtaattttaaaattatgttttaaaatggactatgacatacttaccgtaagtgtaaagtatttctatttcttgcctttatataccttctggcaaggac

SEQ ID NO: 8225 - DNA, 238 bp, synthetic construct
  misc_feature 1..238: note = promoter
  source 1..238: mol_type = other DNA
gagggcctatttcccatgagtccttcatatttgcatatacgatgcaagaatgttagagagataattagaattaatttggctgtaaacataaagatattagtacaaaatattgatgcagaaagtaataatttattggggtttgtaattttaaaattatgttttaaaatggactatgacatacttaccgtaagtgtaaagtatttctatttcttgcctttatataccttctggcaaggac

SEQ ID NO: 8226 - DNA, 238 bp, synthetic construct
  misc_feature 1..238: note = promoter
  source 1..238: mol_type = other DNA
gagggcctatttcccatgagtccttcatatttgcatatacgatgcaagaatgttagagagataattagaattaatttggctgtaaacataaagatattagtacaaaatattgatgcagaaagtaataatttattgggttttgtaattttaaaattatgttttaaaatggactatgacatacttaccgtaagtgtaaagtatttctatttcttgcctttatataccttctggcaaggac

SEQ ID NO: 8227 - DNA, 238 bp, synthetic construct
  misc_feature 1..238: note = promoter
  source 1..238: mol_type = other DNA
gagggcctatttcccatgagtccttcatatttgcatatacgatgcaagaatgttagagagataattagaattaatttggctgtaaacataaagatattagtacaaaatattgatgcagaaagtaataatttattgggtattgtaattttaaaattatgttttaaaatggactatgacatacttaccgtaagtgtaaagtatttctatttcttgcctttatataccttctggcaaggac

SEQ ID NO: 8228 - DNA, 238 bp, synthetic construct
  misc_feature 1..238: note = promoter
  source 1..238: mol_type = other DNA
gagggcctatttcccatgagtccttcatatttgcatatacgatgcaagaatgttagagagataattagaattaatttggctgtaaacataaagatattagtacaaaatattgatgcagaaagtaataatttattgggtagtgtaattttaaaattatgttttaaaatggactatgacatacttaccgtaagtgtaaagtatttctatttcttgcctttatataccttctggcaaggac

SEQ ID NO: 8229 - DNA, 238 bp, synthetic construct; identical to SEQ ID NO: 8228
  misc_feature 1..238: note = promoter
  source 1..238: mol_type = other DNA

SEQ ID NO: 8230 - DNA, 238 bp, synthetic construct
  misc_feature 1..238: note = promoter
  source 1..238: mol_type = other DNA
gagggcctatttcccatgagtccttcatatttgcatatacgatgcaagaatgttagagagataattagaattaatttggctgtaaacataaagatattagtacaaaatattgatgcagaaagtaataatttattgggtagtttaattttaaaattatgttttaaaatggactatgacatacttaccgtaagtgtaaagtatttctatttcttgcctttatataccttctggcaaggac

SEQ ID NO: 8231 - DNA, 238 bp, synthetic construct; identical to SEQ ID NO: 8230
  misc_feature 1..238: note = promoter
  source 1..238: mol_type = other DNA

SEQ ID NO: 8232 - DNA, 238 bp, synthetic construct
  misc_feature 1..238: note = promoter
  source 1..238: mol_type = other DNA
gagggcctatttcccatgagtccttcatatttgcatatacgatgcaagaatgttagagagataattagaattaatttggctgtaaacataaagatattagtacaaaatattgatgcagaaagtaataatttattgggtagtttgattttaaaattatgttttaaaatggactatgacatacttaccgtaagtgtaaagtatttctatttcttgcctttatataccttctggcaaggac

SEQ ID NO: 8233 - DNA, 238 bp, synthetic construct
  misc_feature 1..238: note = promoter
  source 1..238: mol_type = other DNA
gagggcctatttcccatgagtccttcatatttgcatatacgatgcaagaatgttagagagataattagaattaatttggctgtaaacataaagatattagtacaaaatattgatgcagaaagtaataatttattgggtagtttgtttttaaaattatgttttaaaatggactatgacatacttaccgtaagtgtaaagtatttctatttcttgcctttatataccttctggcaaggac

SEQ ID NO: 8234 - DNA, 238 bp, synthetic construct
  misc_feature 1..238: note = promoter
  source 1..238: mol_type = other DNA
gagggcctatttcccatgagtccttcatatttgcatatacgatgcaagaatgttagagagataattagaattaatttggctgtaaacataaagatattagtacaaaatattgatgcagaaagtaataatttattgggtagtttgtatttaaaattatgttttaaaatggactatgacatacttaccgtaagtgtaaagtatttctatttcttgcctttatataccttctggcaaggac

SEQ ID NO: 8235 - DNA, 238 bp, synthetic construct
  misc_feature 1..238: note = promoter
  source 1..238: mol_type = other DNA
gagggcctatttcccatgagtccttcatatttgcatatacgatgcaagaatgttagagagataattagaattaatttggctgtaaacataaagatattagtacaaaatattgatgcagaaagtaataatttattgggtagtttgtaattaaaattatgttttaaaatggactatgacatacttaccgtaagtgtaaagtatttctatttcttgcctttatataccttctggcaaggac

SEQ ID NO: 8236 - DNA, 238 bp, synthetic construct; identical to SEQ ID NO: 8235
  misc_feature 1..238: note = promoter
  source 1..238: mol_type = other DNA

SEQ ID NO: 8237 - DNA, 238 bp, synthetic construct; identical to SEQ ID NO: 8235
  misc_feature 1..238: note = promoter
  source 1..238: mol_type = other DNA

SEQ ID NO: 8238 - DNA, 238 bp, synthetic construct
  misc_feature 1..238: note = promoter
  source 1..238: mol_type = other DNA
gagggcctatttcccatgagtccttcatatttgcatatacgatgcaagaatgttagagagataattagaattaatttggctgtaaacataaagatattagtacaaaatattgatgcagaaagtaataatttattgggtagtttgtaatttaaattatgttttaaaatggactatgacatacttaccgtaagtgtaaagtatttctatttcttgcctttatataccttctggcaaggac

SEQ ID NO: 8239 - DNA, 238 bp, synthetic construct
  misc_feature 1..238: note = promoter
  source 1..238: mol_type = other DNA
gagggcctatttcccatgagtccttcatatttgcatatacgatgcaagaatgttagagagataattagaattaatttggctgtaaacataaagatattagtacaaaatattgatgcagaaagtaataatttattgggtagtttgtaattttaattatgttttaaaatggactatgacatacttaccgtaagtgtaaagtatttctatttcttgcctttatataccttctggcaaggac

SEQ ID NO: 8240 - DNA, 238 bp, synthetic construct; identical to SEQ ID NO: 8239
  misc_feature 1..238: note = promoter
  source 1..238: mol_type = other DNA

SEQ ID NO: 8241 - DNA, 238 bp, synthetic construct; identical to SEQ ID NO: 8239
  misc_feature 1..238: note = promoter
  source 1..238: mol_type = other DNA

SEQ ID NO: 8242 - DNA, 238 bp, synthetic construct
  misc_feature 1..238: note = promoter
  source 1..238: mol_type = other DNA
gagggcctatttcccatgagtccttcatatttgcatatacgatgcaagaatgttagagagataattagaattaatttggctgtaaacataaagatattagtacaaaatattgatgcagaaagtaataatttattgggtagtttgtaattttaaatatgttttaaaatggactatgacatacttaccgtaagtgtaaagtatttctatttcttgcctttatataccttctggcaaggac

SEQ ID NO: 8243 - DNA, 238 bp, synthetic construct
  misc_feature 1..238: note = promoter
  source 1..238: mol_type = other DNA
gagggcctatttcccatgagtccttcatatttgcatatacgatgcaagaatgttagagagataattagaattaatttggctgtaaacataaagatattagtacaaaatattgatgcagaaagtaataatttattgggtagtttgtaattttaaaaatgttttaaaatggactatgacatacttaccgtaagtgtaaagtatttctatttcttgcctttatataccttctggcaaggac

SEQ ID NO: 8244 - DNA, 238 bp, synthetic construct
  misc_feature 1..238: note = promoter
  source 1..238: mol_type = other DNA
gagggcctatttcccatgagtccttcatatttgcatatacgatgcaagaatgttagagagataattagaattaatttggctgtaaacataaagatattagtacaaaatattgatgcagaaagtaataatttattgggtagtttgtaattttaaaattgttttaaaatggactatgacatacttaccgtaagtgtaaagtatttctatttcttgcctttatataccttctggcaaggac

SEQ ID NO: 8245 - DNA, 238 bp, synthetic construct; identical to SEQ ID NO: 8244
  misc_feature 1..238: note = promoter
  source 1..238: mol_type = other DNA

SEQ ID NO: 8246 - DNA, 238 bp, synthetic construct
  misc_feature 1..238: note = promoter
  source 1..238: mol_type = other DNA
gagggcctatttcccatgagtccttcatatttgcatatacgatgcaagaatgttagagagataattagaattaatttggctgtaaacataaagatattagtacaaaatattgatgcagaaagtaataatttattgggtagtttgtaattttaaaattattttaaaatggactatgacatacttaccgtaagtgtaaagtatttctatttcttgcctttatataccttctggcaaggac

SEQ ID NO: 8247 - DNA, 238 bp, synthetic construct; identical to SEQ ID NO: 8246
  misc_feature 1..238: note = promoter
  source 1..238: mol_type = other DNA

SEQ ID NO: 8248 - DNA, 238 bp, synthetic construct
  misc_feature 1..238: note = promoter
  source 1..238: mol_type = other DNA
gagggcctatttcccatgagtccttcatatttgcatatacgatgcaagaatgttagagagataattagaattaatttggctgtaaacataaagatattagtacaaaatattgatgcagaaagtaataatttattgggtagtttgtaattttaaaattatgttaaaatggactatgacatacttaccgtaagtgtaaagtatttctatttcttgcctttatataccttctggcaaggac

SEQ ID NO: 8249 - DNA, 238 bp, synthetic construct; identical to SEQ ID NO: 8248
  misc_feature 1..238: note = promoter
  source 1..238: mol_type = other DNA

SEQ ID NO: 8250 - DNA, 238 bp, synthetic construct; identical to SEQ ID NO: 8248
  misc_feature 1..238: note = promoter
  source 1..238: mol_type = other DNA

SEQ ID NO: 8251 - DNA, 238 bp, synthetic construct
  misc_feature 1..238: note = promoter
  source 1..238: mol_type = other DNA
gagggcctatttcccatgagtccttcatatttgcatatacgatgcaagaatgttagagagataattagaattaatttggctgtaaacataaagatattagtacaaaatattgatgcagaaagtaataatttattgggtagtttgtaattttaaaattatgtttaaatggactatgacatacttaccgtaagtgtaaagtatttctatttcttgcctttatataccttctggcaaggac

SEQ ID NO: 8252 - DNA, 238 bp, synthetic construct
  misc_feature 1..238: note = promoter
  source 1..238: mol_type = other DNA
gagggcctatttcccatgagtccttcatatttgcatatacgatgcaagaatgttagagagataattagaattaatttggctgtaaacataaagatattagtacaaaatattgatgcagaaagtaataatttattgggtagtttgtaattttaaaattatgttttaatggactatgacatacttaccgtaagtgtaaagtatttctatttcttgcctttatataccttctggcaaggac

SEQ ID NO: 8253 - DNA, 238 bp, synthetic construct; identical to SEQ ID NO: 8252
  misc_feature 1..238: note = promoter
  source 1..238: mol_type = other DNA

SEQ ID NO: 8254 - DNA, 238 bp, synthetic construct; identical to SEQ ID NO: 8252
  misc_feature 1..238: note = promoter
  source 1..238: mol_type = other DNA

SEQ ID NO: 8255 - DNA, 238 bp, synthetic construct
  misc_feature 1..238: note = promoter
  source 1..238: mol_type = other DNA
gagggcctatttcccatgagtccttcatatttgcatatacgatgcaagaatgttagagagataattagaattaatttggctgtaaacataaagatattagtacaaaatattgatgcagaaagtaataatttattgggtagtttgtaattttaaaattatgttttaaaggactatgacatacttaccgtaagtgtaaagtatttctatttcttgcctttatataccttctggcaaggac

SEQ ID NO: 8256 - DNA, 238 bp, synthetic construct
  misc_feature 1..238: note = promoter
  source 1..238: mol_type = other DNA
gagggcctatttcccatgagtccttcatatttgcatatacgatgcaagaatgttagagagataattagaattaatttggctgtaaacataaagatattagtacaaaatattgatgcagaaagtaataatttattgggtagtttgtaattttaaaattatgttttaaaagactatgacatacttaccgtaagtgtaaagtatttctatttcttgcctttatataccttctggcaaggac

SEQ ID NO: 8257 - DNA, 238 bp, synthetic construct
  misc_feature 1..238: note = promoter
  source 1..238: mol_type = other DNA
gagggcctatttcccatgagtccttcatatttgcatatacgatgcaagaatgttagagagataattagaattaatttggctgtaaacataaagatattagtacaaaatattgatgcagaaagtaataatttattgggtagtttgtaattttaaaattatgttttaaaatactatgacatacttaccgtaagtgtaaagtatttctatttcttgcctttatataccttctggcaaggac

SEQ ID NO: 8258 - DNA, 238 bp, synthetic construct
  misc_feature 1..238: note = promoter
  source 1..238: mol_type = other DNA
gagggcctatttcccatgagtccttcatatttgcatatacgatgcaagaatgttagagagataattagaattaatttggctgtaaacataaagatattagtacaaaatattgatgcagaaagtaataatttattgggtagtttgtaattttaaaattatgttttaaaatgctatgacatacttaccgtaagtgtaaagtatttctatttcttgcctttatataccttctggcaaggac

SEQ ID NO: 8259 - DNA, 238 bp, synthetic construct
  misc_feature 1..238: note = promoter
  source 1..238: mol_type = other DNA
gagggcctatttcccatgagtccttcatatttgcatatacgatgcaagaatgttagagagataattagaattaatttggctgtaaacataaagatattagtacaaaatattgatgcagaaagtaataatttattgggtagtttgtaattttaaaattatgttttaaaatggtatgacatacttaccgtaagtgtaaagtatttctatttcttgcctttatataccttctggcaaggac

SEQ ID NO: 8260 - DNA, 238 bp, synthetic construct
  misc_feature 1..238: note = promoter
  source 1..238: mol_type = other DNA
gagggcctatttcccatgagtccttcatatttgcatatacgatgcaagaatgttagagagataattagaattaatttggctgtaaacataaagatattagtacaaaatattgatgcagaaagtaataatttattgggtagtttgtaattttaaaattatgttttaaaatggaatgacatacttaccgtaagtgtaaagtatttctatttcttgcctttatataccttctggcaaggac

SEQ ID NO: 8261 - DNA, 238 bp, synthetic construct
  misc_feature 1..238: note = promoter
  source 1..238: mol_type = other DNA
gagggcctatttcccatgagtccttcatatttgcatatacgatgcaagaatgttagagagataattagaattaatttggctgtaaacataaagatattagtacaaaatattgatgcagaaagtaataatttattgggtagtttgtaattttaaaattatgttttaaaatggactgacatacttaccgtaagtgtaaagtatttctatttcttgcctttatataccttctggcaaggac

SEQ ID NO: 8262 - DNA, 238 bp, synthetic construct; identical to SEQ ID NO: 8261
  misc_feature 1..238: note = promoter
  source 1..238: mol_type = other DNA

SEQ ID NO: 8263 - DNA, 238 bp, synthetic construct
  misc_feature 1..238: note = promoter
  source 1..238: mol_type = other DNA
gagggcctatttcccatgagtccttcatatttgcatatacgatgcaagaatgttagagagataattagaattaatttggctgtaaacataaagatattagtacaaaatattgatgcagaaagtaataatttattgggtagtttgtaattttaaaattatgttttaaaatggactaacatacttaccgtaagtgtaaagtatttctatttcttgcctttatataccttctggcaaggac

SEQ ID NO: 8264 - DNA, 238 bp, synthetic construct
  misc_feature 1..238: note = promoter
  source 1..238: mol_type = other DNA
gagggcctatttcccatgagtccttcatatttgcatatacgatgcaagaatgttagagagataattagaattaatttggctgtaaacataaagatattagtacaaaatattgatgcagaaagtaataatttattgggtagtttgtaattttaaaattatgttttaaaatggactatcatacttaccgtaagtgtaaagtatttctatttcttgcctttatataccttctggcaaggac

SEQ ID NO: 8265 - DNA, 238 bp, synthetic construct
  misc_feature 1..238: note = promoter
  source 1..238: mol_type = other DNA
gagggcctatttcccatgagtccttcatatttgcatatacgatgcaagaatgttagagagataattagaattaatttggctgtaaacataaagatattagtacaaaatattgatgcagaaagtaataatttattgggtagtttgtaattttaaaattatgttttaaaatggactatgatacttaccgtaagtgtaaagtatttctatttcttgcctttatataccttctggcaaggac

SEQ ID NO: 8266 - DNA, 238 bp, synthetic construct; identical to SEQ ID NO: 8265
  misc_feature 1..238: note = promoter
  source 1..238: mol_type = other DNA

SEQ ID NO: 8267 - DNA, 238 bp, synthetic construct
  misc_feature 1..238: note = promoter
  source 1..238: mol_type = other DNA
gagggcctatttcccatgagtccttcatatttgcatatacgatgcaagaatgttagagagataattagaattaatttggctgtaaacataaagatattagtacaaaatattgatgcagaaagtaataatttattgggtagtttgtaattttaaaattatgttttaaaatggactatgacacttaccgtaagtgtaaagtatttctatttcttgcctttatataccttctggcaaggac

SEQ ID NO: 8268 - DNA, 238 bp, synthetic construct; identical to SEQ ID NO: 8267
  misc_feature 1..238: note = promoter
  source 1..238: mol_type = other DNA

SEQ ID NO: 8269 - DNA, 238 bp, synthetic construct
  misc_feature 1..238: note = promoter
  source 1..238: mol_type = other DNA
gagggcctatttcccatgagtccttcatatttgcatatacgatgcaagaatgttagagagataattagaattaatttggctgtaaacataaagatattagtacaaaatattgatgcagaaagtaataatttattgggtagtttgtaattttaaaattatgttttaaaatggactatgacatttaccgtaagtgtaaagtatttctatttcttgcctttatataccttctggcaaggac

SEQ ID NO: 8270 - DNA, 238 bp, synthetic construct
  misc_feature 1..238: note = promoter
  source 1..238: mol_type = other DNA
gagggcctatttcccatgagtccttcatatttgcatatacgatgcaagaatgttagagagataattagaattaatttggctgtaaacataaagatattagtacaaaatattgatgcagaaagtaataatttattgggtagtttgtaattttaaaattatgttttaaaatggactatgacatataccgtaagtgtaaagtatttctatttcttgcctttatataccttctggcaaggac

SEQ ID NO: 8271 - DNA, 238 bp, synthetic construct
  misc_feature 1..238: note = promoter
  source 1..238: mol_type = other DNA
gagggcctatttcccatgagtccttcatatttgcatatacgatgcaagaatgttagagagataattagaattaatttggctgtaaacataaagatattagtacaaaatattgatgcagaaagtaataatttattgggtagtttgtaattttaaaattatgttttaaaatggactatgacatacaccgtaagtgtaaagtatttctatttcttgcctttatataccttctggcaaggac

SEQ ID NO: 8272 - DNA, 238 bp, synthetic construct
  misc_feature 1..238: note = promoter
  source 1..238: mol_type = other DNA
gagggcctatttcccatgagtccttcatatttgcatatacgatgcaagaatgttagagagataattagaattaatttggctgtaaacataaagatattagtacaaaatattgatgcagaaagtaataatttattgggtagtttgtaattttaaaattatgttttaaaatggactatgacatactccgtaagtgtaaagtatttctatttcttgcctttatataccttctggcaaggac

SEQ ID NO: 8273 - DNA, 238 bp, synthetic construct
  misc_feature 1..238: note = promoter
  source 1..238: mol_type = other DNA
gagggcctatttcccatgagtccttcatatttgcatatacgatgcaagaatgttagagagataattagaattaatttggctgtaaacataaagatattagtacaaaatattgatgcagaaagtaataatttattgggtagtttgtaattttaaaattatgttttaaaatggactatgacatacttcgtaagtgtaaagtatttctatttcttgcctttatataccttctggcaaggac

SEQ ID NO: 8274 - DNA, 238 bp, synthetic construct
  misc_feature 1..238: note = promoter
  source 1..238: mol_type = other DNA
gagggcctatttcccatgagtccttcatatttgcatatacgatgcaagaatgttagagagataattagaattaatttggctgtaaacataaagatattagtacaaaatattgatgcagaaagtaataatttattgggtagtttgtaattttaaaattatgttttaaaatggactatgacatacttagtaagtgtaaagtatttctatttcttgcctttatataccttctggcaaggac

SEQ ID NO: 8275 - DNA, 238 bp, synthetic construct
  misc_feature 1..238: note = promoter
  source 1..238: mol_type = other DNA
gagggcctatttcccatgagtccttcatatttgcatatacgatgcaagaatgttagagagataattagaattaatttggctgtaaacataaagatattagtacaaaatattgatgcagaaagtaataatttattgggtagtttgtaattttaaaattatgttttaaaatggactatgacatacttactaagtgtaaagtatttctatttcttgcctttatataccttctggcaaggac

SEQ ID NO: 8276 - DNA, 238 bp, synthetic construct
  misc_feature 1..238: note = promoter
  source 1..238: mol_type = other DNA
gagggcctatttcccatgagtccttcatatttgcatatacgatgcaagaatgttagagagataattagaattaatttggctgtaaacataaagatattagtacaaaatattgatgcagaaagtaataatttattgggtagtttgtaattttaaaattatgttttaaaatggactatgacatacttaccaagtgtaaagtatttctatttcttgcctttatataccttctggcaaggac

SEQ ID NO: 8277 - DNA, 238 bp, synthetic construct
  misc_feature 1..238: note = promoter
  source 1..238: mol_type = other DNA
gagggcctatttcccatgagtccttcatatttgcatatacgatgcaagaatgttagagagataattagaattaatttggctgtaaacataaagatattagtacaaaatattgatgcagaaagtaataatttattgggtagtttgtaattttaaaattatgttttaaaatggactatgacatacttaccgagtgtaaagtatttctatttcttgcctttatataccttctggcaaggac

SEQ ID NO: 8278 - DNA, 238 bp, synthetic construct
  misc_feature 1..238: note = promoter
  source 1..238: mol_type = other DNA
gagggcctatttcccatgagtccttcatatttgcatatacgatgcaagaatgttagagagataattagaattaatttggctgtaaacataaagatattagtacaaaatattgatgcagaaagtaataatttattgggtagtttgtaattttaaaattatgttttaaaatggactatgacatacttaccgtgtgtaaagtatttctatttcttgcctttatataccttctggcaaggac

SEQ ID NO: 8279 - DNA, 238 bp, synthetic construct
  misc_feature 1..238: note = promoter
  source 1..238: mol_type = other DNA
gagggcctatttcccatgagtccttcatatttgcatatacgatgcaagaatgttagagagataattagaattaatttggctgtaaacataaagatattagtacaaaatattgatgcagaaagtaataatttattgggtagtttgtaattttaaaattatgttttaaaatggactatgacatacttaccgtatgtaaagtatttctatttcttgcctttatataccttctggcaaggac

SEQ ID NO: 8280 - DNA, 238 bp, synthetic construct
  misc_feature 1..238: note = promoter
  source 1..238: mol_type = other DNA
gagggcctatttcccatgagtccttcatatttgcatatacgatgcaagaatgttagagagataattagaattaatttggctgtaaacataaagatattagtacaaaatattgatgcagaaagtaataatttattgggtagtttgtaattttaaaattatgttttaaaatggactatgacatacttaccgtaagtaaagtatttctatttcttgcctttatataccttctggcaaggac

SEQ ID NO: 8281 - DNA, 238 bp, synthetic construct; identical to SEQ ID NO: 8280
  misc_feature 1..238: note = promoter
  source 1..238: mol_type = other DNA

SEQ ID NO: 8282 - DNA, 238 bp, synthetic construct; identical to SEQ ID NO: 8280
  misc_feature 1..238: note = promoter
  source 1..238: mol_type = other DNA

SEQ ID NO: 8283 - DNA, 238 bp, synthetic construct
  misc_feature 1..238: note = promoter
  source 1..238: mol_type = other DNA
gagggcctatttcccatgagtccttcatatttgcatatacgatgcaagaatgttagagagataattagaattaatttggctgtaaacataaagatattagtacaaaatattgatgcagaaagtaataatttattgggtagtttgtaattttaaaattatgttttaaaatggactatgacatacttaccgtaagtgaagtatttctatttcttgcctttatataccttctggcaaggac

SEQ ID NO: 8284 - DNA, 238 bp, synthetic construct
  misc_feature 1..238: note = promoter
  source 1..238: mol_type = other DNA
gagggcctatttcccatgagtccttcatatttgcatatacgatgcaagaatgttagagagataattagaattaatttggctgtaaacataaagatattagtacaaaatattgatgcagaaagtaataatttattgggtagtttgtaattttaaaattatgttttaaaatggactatgacatacttaccgtaagtgtagtatttctatttcttgcctttatataccttctggcaaggac

SEQ ID NO: 8285 - DNA, 238 bp, synthetic construct; identical to SEQ ID NO: 8284
  misc_feature 1..238: note = promoter
  source 1..238: mol_type = other DNA

SEQ ID NO: 8286 - DNA, 238 bp, synthetic construct
  misc_feature 1..238: note = promoter
  source 1..238: mol_type = other DNA
gagggcctatttcccatgagtccttcatatttgcatatacgatgcaagaatgttagagagataattagaattaatttggctgtaaacataaagatattagtacaaaatattgatgcagaaagtaataatttattgggtagtttgtaattttaaaattatgttttaaaatggactatgacatacttaccgtaagtgtaatatttctatttcttgcctttatataccttctggcaaggac

SEQ ID NO: 8287 - DNA, 238 bp, synthetic construct
  misc_feature 1..238: note = promoter
  source 1..238: mol_type = other DNA
gagggcctatttcccatgagtccttcatatttgcatatacgatgcaagaatgttagagagataattagaattaatttggctgtaaacataaagatattagtacaaaatattgatgcagaaagtaataatttattgggtagtttgtaattttaaaattatgttttaaaatggactatgacatacttaccgtaagtgtaaaatttctatttcttgcctttatataccttctggcaaggac

SEQ ID NO: 8288 - DNA, 238 bp, synthetic construct
  misc_feature 1..238: note = promoter
  source 1..238: mol_type = other DNA
gagggcctatttcccatgagtccttcatatttgcatatacgatgcaagaatgttagagagataattagaattaatttggctgtaaacataaagatattagtacaaaatattgatgcagaaagtaataatttattgggtagtttgtaattttaaaattatgttttaaaatggactatgacatacttaccgtaagtgtaaagtttctatttcttgcctttatataccttctggcaaggac

SEQ ID NO: 8289 - DNA, 238 bp, synthetic construct; identical to SEQ ID NO: 8288
  misc_feature 1..238: note = promoter
  source 1..238: mol_type = other DNA

SEQ ID NO: 8290 - DNA, 238 bp, synthetic construct
  misc_feature 1..238: note = promoter
  source 1..238: mol_type = other DNA
gagggcctatttcccatgagtccttcatatttgcatatacgatgcaagaatgttagagagataattagaattaatttggctgtaaacataaagatattagtacaaaatattgatgcagaaagtaataatttattgggtagtttgtaattttaaaattatgttttaaaatggactatgacatacttaccgtaagtgtaaagtatctatttcttgcctttatataccttctggcaaggac

SEQ ID NO: 8291 - DNA, 238 bp, synthetic construct; identical to SEQ ID NO: 8290
  misc_feature 1..238: note = promoter
  source 1..238: mol_type = other DNA

SEQ ID NO: 8292 - DNA, 238 bp, synthetic construct
  misc_feature 1..238: note = promoter
  source 1..238: mol_type = other DNA
gagggcctatttcccatgagtccttcatatttgcatatacgatgcaagaatgttagagagataattagaattaatttggctgtaaacataaagatattagtacaaaatattgatgcagaaagtaataatttattgggtagtttgtaattttaaaattatgttttaaaatggactatgacatacttaccgtaagtgtaaagtatttatttcttgcctttatataccttctggcaaggac

SEQ ID NO: 8293 - DNA, 238 bp, synthetic construct; identical to SEQ ID NO: 8292
  misc_feature 1..238: note = promoter
  source 1..238: mol_type = other DNA

SEQ ID NO: 8294 - DNA, 238 bp, synthetic construct
  misc_feature 1..238: note = promoter
  source 1..238: mol_type = other DNA
gagggcctatttcccatgagtccttcatatttgcatatacgatgcaagaatgttagagagataattagaattaatttggctgtaaacataaagatattagtacaaaatattgatgcagaaagtaataatttattgggtagtttgtaattttaaaattatgttttaaaatggactatgacatacttaccgtaagtgtaaagtatttctttcttgcctttatataccttctggcaaggac

SEQ ID NO: 8295 - DNA, 238 bp, synthetic construct; identical to SEQ ID NO: 8294
  misc_feature 1..238: note = promoter
  source 1..238: mol_type = other DNA

SEQ ID NO: 8296 - DNA, 238 bp, synthetic construct
  misc_feature 1..238: note = promoter
  source 1..238: mol_type = other DNA
gagggcctatttcccatgagtccttcatatttgcatatacgatgcaagaatgttagagagataattagaattaatttggctgtaaacataaagatattagtacaaaatattgatgcagaaagtaataatttattgggtagtttgtaattttaaaattatgttttaaaatggactatgacatacttaccgtaagtgtaaagtatttctatcttgcctttatataccttctggcaaggac

SEQ ID NO: 8297 - DNA, 238 bp, synthetic construct; identical to SEQ ID NO: 8296
  misc_feature 1..238: note = promoter
  source 1..238: mol_type = other DNA

SEQ ID NO: 8298 - DNA, 238 bp, synthetic construct
  misc_feature 1..238: note = promoter
  source 1..238: mol_type = other DNA
gagggcctatttcccatgagtccttcatatttgcatatacgatgcaagaatgttagagagataattagaattaatttggctgtaaacataaagatattagtacaaaatattgatgcagaaagtaataatttattgggtagtttgtaattttaaaattatgttttaaaatggactatgacatacttaccgtaagtgtaaagtatttctattttgcctttatataccttctggcaaggac

SEQ ID NO: 8299 - DNA, 238 bp, synthetic construct; identical to SEQ ID NO: 8298
  misc_feature 1..238: note = promoter
  source 1..238: mol_type = other DNA

SEQ ID NO: 8300 - DNA, 238 bp, synthetic construct
  misc_feature 1..238: note = promoter
  source 1..238: mol_type = other DNA
gagggcctatttcccatgagtccttcatatttgcatatacgatgcaagaatgttagagagataattagaattaatttggctgtaaacataaagatattagtacaaaatattgatgcagaaagtaataatttattgggtagtttgtaattttaaaattatgttttaaaatggactatgacatacttaccgtaagtgtaaagtatttctatttcgcctttatataccttctggcaaggac

SEQ ID NO: 8301 - DNA, 238 bp, synthetic construct
  misc_feature 1..238: note = promoter
  source 1..238: mol_type = other DNA
gagggcctatttcccatgagtccttcatatttgcatatacgatgcaagaatgttagagagataattagaattaatttggctgtaaacataaagatattagtacaaaatattgatgcagaaagtaataatttattgggtagtttgtaattttaaaattatgttttaaaatggactatgacatacttaccgtaagtgtaaagtatttctatttctcctttatataccttctggcaaggac

SEQ ID NO: 8302 - DNA, 238 bp, synthetic construct
  misc_feature 1..238: note = promoter
  source 1..238: mol_type = other DNA
gagggcctatttcccatgagtccttcatatttgcatatacgatgcaagaatgttagagagataattagaattaatttggctgtaaacataaagatattagtacaaaatattgatgcagaaagtaataatttattgggtagtttgtaattttaaaattatgttttaaaatggactatgacatacttaccgtaagtgtaaagtatttctatttcttctttatataccttctggcaaggac

SEQ ID NO: 8303 - DNA, 238 bp, synthetic construct
  misc_feature 1..238: note = promoter
  source 1..238: mol_type = other DNA
gagggcctatttcccatgagtccttcatatttgcatatacgatgcaagaatgttagagagataattagaattaatttggctgtaaacataaagatattagtacaaaatattgatgcagaaagtaataatttattgggtagtttgtaattttaaaattatgttttaaaatggactatgacatacttaccgtaagtgtaaagtatttctatttcttgtttatataccttctggcaaggac

SEQ ID NO: 8304 - DNA, 238 bp, synthetic construct
  misc_feature 1..238: note = promoter
  source 1..238: mol_type = other DNA
gagggcctatttcccatgagtccttcatatttgcatatacgatgcaagaatgttagagagataattagaattaatttggctgtaaacataaagatattagtacaaaatattgatgcagaaagtaataatttattgggtagtttgtaattttaaaattatgttttaaaatggactatgacatacttaccgtaagtgtaaagtatttctatttcttgcttatataccttctggcaaggac

SEQ ID NO: 8305 - DNA, 238 bp, synthetic construct
  misc_feature 1..238: note = promoter
  source 1..238: mol_type = other DNA
gagggcctatttcccatgagtccttcatatttgcatatacgatgcaagaatgttagagagataattagaattaatttggctgtaaacataaagatattagtacaaaatattgatgcagaaagtaataatttattgggtagtttgtaattttaaaattatgttttaaaatggactatgacatacttaccgtaagtgtaaagtatttctatttcttgcctatataccttctggcaaggac

SEQ ID NO: 8306 - DNA, 238 bp, synthetic construct; identical to SEQ ID NO: 8305
  misc_feature 1..238: note = promoter
  source 1..238: mol_type = other DNA

SEQ ID NO: 8307 - DNA, 238 bp, synthetic construct
  misc_feature 1..238: note = promoter
  source 1..238: mol_type = other DNA
gagggcctatttcccatgagtccttcatatttgcatatacgatgcaagaatgttagagagataattagaattaatttggctgtaaacataaagatattagtacaaaatattgatgcagaaagtaataatttattgggtagtttgtaattttaaaattatgttttaaaatggactatgacatacttaccgtaagtgtaaagtatttctatttcttgcctttataccttctggcaaggac

SEQ ID NO: 8308 - DNA, 238 bp, synthetic construct; identical to SEQ ID NO: 8307
  misc_feature 1..238: note = promoter
  source 1..238: mol_type = other DNA

SEQ ID NO: 8309 - DNA, 238 bp, synthetic construct; identical to SEQ ID NO: 8307
  misc_feature 1..238: note = promoter
  source 1..238: mol_type = other DNA

SEQ ID NO: 8310 - DNA, 238 bp, synthetic construct; identical to SEQ ID NO: 8307
  misc_feature 1..238: note = promoter
  source 1..238: mol_type = other DNA

SEQ ID NO: 8311 - DNA, 238 bp, synthetic construct; identical to SEQ ID NO: 8307
  misc_feature 1..238: note = promoter
  source 1..238: mol_type = other DNA

SEQ ID NO: 8312 - DNA, 238 bp, synthetic construct
  misc_feature 1..238: note = promoter
  source 1..238: mol_type = other DNA
gagggcctatttcccatgagtccttcatatttgcatatacgatgcaagaatgttagagagataattagaattaatttggctgtaaacataaagatattagtacaaaatattgatgcagaaagtaataatttattgggtagtttgtaattttaaaattatgttttaaaatggactatgacatacttaccgtaagtgtaaagtatttctatttcttgcctttatatcttctggcaaggac

SEQ ID NO: 8313 - DNA, 238 bp, synthetic construct
  misc_feature 1..238: note = promoter
  source 1..238: mol_type = other DNA
gagggcctatttcccatgagtccttcatatttgcatatacgatgcaagaatgttagagagataattagaattaatttggctgtaaacataaagatattagtacaaaatattgatgcagaaagtaataatttattgggtagtttgtaattttaaaattatgttttaaaatggactatgacatacttaccgtaagtgtaaagtatttctatttcttgcctttatatattctggcaaggac

SEQ ID NO: 8314 - DNA, 238 bp, synthetic construct
  misc_feature 1..238: note = promoter
  source 1..238: mol_type = other DNA
gagggcctatttcccatgagtccttcatatttgcatatacgatgcaagaatgttagagagataattagaattaatttggctgtaaacataaagatattagtacaaaatattgatgcagaaagtaataatttattgggtagtttgtaattttaaaattatgttttaaaatggactatgacatacttaccgtaagtgtaaagtatttctatttcttgcctttatatactctggcaaggac

SEQ ID NO: 8315 - DNA, 238 bp, synthetic construct
  misc_feature 1..238: note = promoter
  source 1..238: mol_type = other DNA
gagggcctatttcccatgagtccttcatatttgcatatacgatgcaagaatgttagagagataattagaattaatttggctgtaaacataaagatattagtacaaaatattgatgcagaaagtaataatttattgggtagtttgtaattttaaaattatgttttaaaatggactatgacatacttaccgtaagtgtaaagtatttctatttcttgcctttatataccctggcaaggac

SEQ ID NO: 8316 - DNA, 238 bp, synthetic construct
  misc_feature 1..238: note = promoter
  source 1..238: mol_type = other DNA
gagggcctatttcccatgagtccttcatatttgcatatacgatgcaagaatgttagagagataattagaattaatttggctgtaaacataaagatattagtacaaaatattgatgcagaaagtaataatttattgggtagtttgtaattttaaaattatgttttaaaatggactatgacatacttaccgtaagtgtaaagtatttctatttcttgcctttatataccttggcaaggac

SEQ ID NO: 8317 - DNA, 238 bp, synthetic construct; identical to SEQ ID NO: 8316
  misc_feature 1..238: note = promoter
  source 1..238: mol_type = other DNA

SEQ ID NO: 8318 - DNA, 238 bp, synthetic construct
  misc_feature 1..238: note = promoter
  source 1..238: mol_type = other DNA
gagggcctatttcccatgagtccttcatatttgcatatacgatgcaagaatgttagagagataattagaattaatttggctgtaaacataaagatattagtacaaaatattgatgcagaaagtaataatttattgggtagtttgtaattttaaaattatgttttaaaatggactatgacatacttaccgtaagtgtaaagtatttctatttcttgcctttatataccttcgcaaggac

SEQ ID NO: 8319 - DNA, 238 bp, synthetic construct
  misc_feature 1..238: note = promoter
  source 1..238: mol_type = other DNA
gagggcctatttcccatgagtccttcatatttgcatatacgatgcaagaatgttagagagataattagaattaatttggctgtaaacataaagatattagtacaaaatattgatgcagaaagtaataatttattgggtagtttgtaattttaaaattatgttttaaaatggactatgacatacttaccgtaagtgtaaagtatttctatttcttgcctttatataccttctcaaggac

SEQ ID NO: 8320 - DNA, 238 bp, synthetic construct
  misc_feature 1..238: note = promoter
  source 1..238: mol_type = other DNA
gagggcctatttcccatgagtccttcatatttgcatatacgatgcaagaatgttagagagataattagaattaatttggctgtaaacataaagatattagtacaaaatattgatgcagaaagtaataatttattgggtagtttgtaattttaaaattatgttttaaaatggactatgacatacttaccgtaagtgtaaagtatttctatttcttgcctttatataccttctgaaggac

SEQ ID NO: 8321 - DNA, 238 bp, synthetic construct
  misc_feature 1..238: note = promoter
  source 1..238: mol_type = other DNA
gagggcctatttcccatgagtccttcatatttgcatatacgatgcaagaatgttagagagataattagaattaatttggctgtaaacataaagatattagtacaaaatattgatgcagaaagtaataatttattgggtagtttgtaattttaaaattatgttttaaaatggactatgacatacttaccgtaagtgtaaagtatttctatttcttgcctttatataccttctggaggac

SEQ ID NO: 8322 - DNA, 238 bp, synthetic construct
  misc_feature 1..238: note = promoter
  source 1..238: mol_type = other DNA
gagggcctatttcccatgagtccttcatatttgcatatacgatgcaagaatgttagagagataattagaattaatttggctgtaaacataaagatattagtacaaaatattgatgcagaaagtaataatttattgggtagtttgtaattttaaaattatgttttaaaatggactatgacatacttaccgtaagtgtaaagtatttctatttcttgcctttatataccttctggcggac

SEQ ID NO: 8323 - DNA, 238 bp, synthetic construct
  misc_feature 1..238: note = promoter
  source 1..238: mol_type = other DNA
gagggcctatttcccatgagtccttcatatttgcatatacgatgcaagaatgttagagagataattagaattaatttggctgtaaacataaagatattagtacaaaatattgatgcagaaagtaataatttattgggtagtttgtaattttaaaattatgttttaaaatggactatgacatacttaccgtaagtgtaaagtatttctatttcttgcctttatataccttctggcagac

SEQ ID NO: 8324 - DNA, 238 bp, synthetic construct
  misc_feature 1..238: note = promoter
  source 1..238: mol_type = other DNA
gagggcctatttcccatgagtccttcatatttgcatatacgatgcaagaatgttagagagataattagaattaatttggctgtaaacataaagatattagtacaaaatattgatgcagaaagtaataatttattgggtagtttgtaattttaaaattatgttttaaaatggactatgacatacttaccgtaagtgtaaagtatttctatttcttgcctttatataccttctggcaaac

SEQ ID NO: 8325 - DNA, 238 bp, synthetic construct
  misc_feature 1..238: note = promoter
  source 1..238: mol_type = other DNA
gagggcctatttcccatgagtccttcatatttgcatatacgatgcaagaatgttagagagataattagaattaatttggctgtaaacataaagatattagtacaaaatattgatgcagaaagtaataatttattgggtagtttgtaattttaaaattatgttttaaaatggactatgacatacttaccgtaagtgtaaagtatttctatttcttgcctttatataccttctggcaagc

SEQ ID NO: 8326 - DNA, 238 bp, synthetic construct
  misc_feature 1..238: note = promoter
  source 1..238: mol_type = other DNA
gagggcctatttcccatgagtccttcatatttgcatatacgatgcaagaatgttagagagataattagaattaatttggctgtaaacataaagatattagtacaaaatattgatgcagaaagtaataatttattgggtagtttgtaattttaaaattatgttttaaaatggactatgacatacttaccgtaagtgtaaagtatttctatttcttgcctttatataccttctggcaagg

SEQ ID NO: 8327 - DNA, 239 bp, synthetic construct
  misc_feature 1..239: note = promoter
  source 1..239: mol_type = other DNA
gagggcctatttcccatgagtccttcatatttgcatatacgatgcaagaatgttagagagataattagaattaatttggctgtaaacataaagatattagtacaaaatattgatgcagaaagtaataatttattgggtagtttgtaattttaaaattatgttttaaaatggactatgacatacttaccgtaagtgtaaagtatttctatttcttgcctttatataccttctggcaagga

SEQ ID NO: 8328 - DNA, 230 bp, synthetic construct
  misc_feature 1..230: note = promoter
  source 1..230: mol_type = other DNA
ttcccatgagtccttcatatttgcatatacgatgcaagaatgttagagagataattagaattaatttggctgtaaacataaagatattagtacaaaatattgatgcagaaagtaataatttattgggtagtttgtaattttaaaattatgttttaaaatggactatgacatacttaccgtaagtgtaaagtatttctatttcttgcctttatataccttctggcaaggac

SEQ ID NO: 8329 - DNA, 230 bp, synthetic construct
  misc_feature 1..230: note = promoter
  source 1..230: mol_type = other DNA
gtcccatgagtccttcatatttgcatatacgatgcaagaatgttagagagataattagaattaatttggctgtaaacataaagatattagtacaaaatattgatgcagaaagtaataatttattgggtagtttgtaattttaaaattatgttttaaaatggactatgacatacttaccgtaagtgtaaagtatttctatttcttgcctttatataccttctggcaaggac

SEQ ID NO: 8330 - DNA, 230 bp, synthetic construct
  misc_feature 1..230: note = promoter
  source 1..230: mol_type = other DNA
gacccatgagtccttcatatttgcatatacgatgcaagaatgttagagagataattagaattaatttggctgtaaacataaagatattagtacaaaatattgatgcagaaagtaataatttattgggtagtttgtaattttaaaattatgttttaaaatggactatgacatacttaccgtaagtgtaaagtatttctatttcttgcctttatataccttctggcaaggac

SEQ ID NO: 8331 - DNA, 230 bp, synthetic construct
  misc_feature 1..230: note = promoter
  source 1..230: mol_type = other DNA
gagccatgagtccttcatatttgcatatacgatgcaagaatgttagagagataattagaattaatttggctgtaaacataaagatattagtacaaaatattgatgcagaaagtaataatttattgggtagtttgtaattttaaaattatgttttaaaatggactatgacatacttaccgtaagtgtaaagtatttctatttcttgcctttatataccttctggcaaggac

SEQ ID NO: 8332 - DNA, 230 bp, synthetic construct
  misc_feature 1..230: note = promoter
  source 1..230: mol_type = other DNA
gaggcatgagtccttcatatttgcatatacgatgcaagaatgttagagagataattagaattaatttggctgtaaacataaagatattagtacaaaatattgatgcagaaagtaataatttattgggtagtttgtaattttaaaattatgttttaaaatggactatgacatacttaccgtaagtgtaaagtatttctatttcttgcctttatataccttctggcaaggac

SEQ ID NO: 8333 - DNA, 230 bp, synthetic construct
  misc_feature 1..230: note = promoter
  source 1..230: mol_type = other DNA
gagggatgagtccttcatatttgcatatacgatgcaagaatgttagagagataattagaattaatttggctgtaaacataaagatattagtacaaaatattgatgcagaaagtaataatttattgggtagtttgtaattttaaaattatgttttaaaatggactatgacatacttaccgtaagtgtaaagtatttctatttcttgcctttatataccttctggcaaggac

SEQ ID NO: 8334 - DNA, 230 bp, synthetic construct
  misc_feature 1..230: note = promoter
  source 1..230: mol_type = other DNA
gagggctgagtccttcatatttgcatatacgatgcaagaatgttagagagataattagaattaatttggctgtaaacataaagatattagtacaaaatattgatgcagaaagtaataatttattgggtagtttgtaattttaaaattatgttttaaaatggactatgacatacttaccgtaagtgtaaagtatttctatttcttgcctttatataccttctggcaaggac

SEQ ID NO: 8335 - DNA, 230 bp, synthetic construct
  misc_feature 1..230: note = promoter
  source 1..230: mol_type = other DNA
gagggccgagtccttcatatttgcatatacgatgcaagaatgttagagagataattagaattaatttggctgtaaacataaagatattagtacaaaatattgatgcagaaagtaataatttattgggtagtttgtaattttaaaattatgttttaaaatggactatgacatacttaccgtaagtgtaaagtatttctatttcttgcctttatataccttctggcaaggac

SEQ ID NO: 8336 - DNA, 230 bp, synthetic construct
  misc_feature 1..230: note = promoter
  source 1..230: mol_type = other DNA
gagggcctagtccttcatatttgcatatacgatgcaagaatgttagagagataattagaattaatttggctgtaaacataaagatattagtacaaaatattgatgcagaaagtaataatttattgggtagtttgtaattttaaaattatgttttaaaatggactatgacatacttaccgtaagtgtaaagtatttctatttcttgcctttatataccttctggcaaggac

SEQ ID NO: 8337 - DNA, 230 bp, synthetic construct; identical to SEQ ID NO: 8336
  misc_feature 1..230: note = promoter
  source 1..230: mol_type = other DNA

SEQ ID NO: 8338 - DNA, 230 bp, synthetic construct
  misc_feature 1..230: note = promoter
  source 1..230: mol_type = other DNA
gagggcctattccttcatatttgcatatacgatgcaagaatgttagagagataattagaattaatttggctgtaaacataaagatattagtacaaaatattgatgcagaaagtaataatttattgggtagtttgtaattttaaaattatgttttaaaatggactatgacatacttaccgtaagtgtaaagtatttctatttcttgcctttatataccttctggcaaggac

SEQ ID NO: 8339 - DNA, 230 bp, synthetic construct; identical to SEQ ID NO: 8338
  misc_feature 1..230: note = promoter
  source 1..230: mol_type = other DNA

SEQ ID NO: 8340 - DNA, 230 bp, synthetic construct
  misc_feature 1..230: note = promoter
  source 1..230: mol_type = other DNA
gagggcctatttcttcatatttgcatatacgatgcaagaatgttagagagataattagaattaatttggctgtaaacataaagatattagtacaaaatattgatgcagaaagtaataatttattgggtagtttgtaattttaaaattatgttttaaaatggactatgacatacttaccgtaagtgtaaagtatttctatttcttgcctttatataccttctggcaaggac

SEQ ID NO: 8341 - DNA, 230 bp, synthetic construct; identical to SEQ ID NO: 8340
  misc_feature 1..230: note = promoter
  source 1..230: mol_type = other DNA

SEQ ID NO: 8342 - DNA, 230 bp, synthetic construct
  misc_feature 1..230: note = promoter
  source 1..230: mol_type = other DNA
gagggcctatttcctcatatttgcatatacgatgcaagaatgttagagagataattagaattaatttggctgtaaacataaagatattagtacaaaatattgatgcagaaagtaataatttattgggtagtttgtaattttaaaattatgttttaaaatggactatgacatacttaccgtaagtgtaaagtatttctatttcttgcctttatataccttctggcaaggac

SEQ ID NO: 8343 - DNA, 230 bp, synthetic construct
  misc_feature 1..230: note = promoter
  source 1..230: mol_type = other DNA
gagggcctatttccccatatttgcatatacgatgcaagaatgttagagagataattagaattaatttggctgtaaacataaagatattagtacaaaatattgatgcagaaagtaataatttattgggtagtttgtaattttaaaattatgttttaaaatggactatgacatacttaccgtaagtgtaaagtatttctatttcttgcctttatataccttctggcaaggac

SEQ ID NO: 8344 - DNA, 230 bp, synthetic construct
  misc_feature 1..230: note = promoter
  source 1..230: mol_type = other DNA
gagggcctatttcccaatatttgcatatacgatgcaagaatgttagagagataattagaattaatttggctgtaaacataaagatattagtacaaaatattgatgcagaaagtaataatttattgggtagtttgtaattttaaaattatgttttaaaatggactatgacatacttaccgtaagtgtaaagtatttctatttcttgcctttatataccttctggcaaggac

SEQ ID NO: 8345 - DNA, 230 bp, synthetic construct
  misc_feature 1..230: note = promoter
  source 1..230: mol_type = other DNA
gagggcctatttcccattatttgcatatacgatgcaagaatgttagagagataattagaattaatttggctgtaaacataaagatattagtacaaaatattgatgcagaaagtaataatttattgggtagtttgtaattttaaaattatgttttaaaatggactatgacatacttaccgtaagtgtaaagtatttctatttcttgcctttatataccttctggcaaggac

SEQ ID NO: 8346 - DNA, 230 bp, synthetic construct
  misc_feature 1..230: note = promoter
  source 1..230: mol_type = other DNA
gagggcctatttcccatgatttgcatatacgatgcaagaatgttagagagataattagaattaatttggctgtaaacataaagatattagtacaaaatattgatgcagaaagtaataatttattgggtagtttgtaattttaaaattatgttttaaaatggactatgacatacttaccgtaagtgtaaagtatttctatttcttgcctttatataccttctggcaaggac

SEQ ID NO: 8347 - DNA, 230 bp, synthetic construct; identical to SEQ ID NO: 8346
  misc_feature 1..230: note = promoter
  source 1..230: mol_type = other DNA

SEQ ID NO: 8348 - DNA, 230 bp, synthetic construct
  misc_feature 1..230: note = promoter
  source 1..230: mol_type = other DNA
gagggcctatttcccatgagttgcatatacgatgcaagaatgttagagagataattagaattaatttggctgtaaacataaagatattagtacaaaatattgatgcagaaagtaataatttattgggtagtttgtaattttaaaattatgttttaaaatggactatgacatacttaccgtaagtgtaaagtatttctatttcttgcctttatataccttctggcaaggac

SEQ ID NO: 8349 - DNA, 230 bp, synthetic construct; identical to SEQ ID NO: 8348
  misc_feature 1..230: note = promoter
  source 1..230: mol_type = other DNA

SEQ ID NO: 8350 - DNA, 230 bp, synthetic construct
  misc_feature 1..230: note = promoter
  source 1..230: mol_type = other DNA
gagggcctatttcccatgagtcgcatatacgatgcaagaatgttagagagataattagaattaatttggctgtaaacataaagatattagtacaaaatattgatgcagaaagtaataatttattgggtagtttgtaattttaaaattatgttttaaaatggactatgacatacttaccgtaagtgtaaagtatttctatttcttgcctttatataccttctggcaaggac

SEQ ID NO: 8351 - DNA, 230 bp, synthetic construct
  misc_feature 1..230: note = promoter
  source 1..230: mol_type = other DNA
gagggcctatttcccatgagtcccatatacgatgcaagaatgttagagagataattagaattaatttggctgtaaacataaagatattagtacaaaatattgatgcagaaagtaataatttattgggtagtttgtaattttaaaattatgttttaaaatggactatgacatacttaccgtaagtgtaaagtatttctatttcttgcctttatataccttctggcaaggac

SEQ ID NO: 8352 - DNA, 230 bp, synthetic construct
  misc_feature 1..230: note = promoter
  source 1..230: mol_type = other DNA
gagggcctatttcccatgagtcctatatacgatgcaagaatgttagagagataattagaattaatttggctgtaaacataaagatattagtacaaaatattgatgcagaaagtaataatttattgggtagtttgtaattttaaaattatgttttaaaatggactatgacatacttaccgtaagtgtaaagtatttctatttcttgcctttatataccttctggcaaggac

SEQ ID NO: 8353 - DNA, 230 bp, synthetic construct
  misc_feature 1..230: note = promoter
  source 1..230: mol_type = other DNA
gagggcctatttcccatgagtcctttatacgatgcaagaatgttagagagataattagaattaatttggctgtaaacataaagatattagtacaaaatattgatgcagaaagtaataatttattgggtagtttgtaattttaaaattatgttttaaaatggactatgacatacttaccgtaagtgtaaagtatttctatttcttgcctttatataccttctggcaaggac

SEQ ID NO: 8354 - DNA, 230 bp, synthetic construct
  misc_feature 1..230: note = promoter
  source 1..230: mol_type = other DNA
gagggcctatttcccatgagtccttcatacgatgcaagaatgttagagagataattagaattaatttggctgtaaacataaagatattagtacaaaatattgatgcagaaagtaataatttattgggtagtttgtaattttaaaattatgttttaaaatggactatgacatacttaccgtaagtgtaaagtatttctatttcttgcctttatataccttctggcaaggac

SEQ ID NO: 8355 - DNA, 230 bp, synthetic construct; identical to SEQ ID NO: 8354
  misc_feature 1..230: note = promoter
  source 1..230: mol_type = other DNA

SEQ ID NO: 8356 - DNA, 230 bp, synthetic construct; identical to SEQ ID NO: 8354
  misc_feature 1..230: note = promoter
  source 1..230: mol_type = other DNA

SEQ ID NO: 8357 - DNA, 230 bp, synthetic construct; identical to SEQ ID NO: 8354
  misc_feature 1..230: note = promoter
  source 1..230: mol_type = other DNA

SEQ ID NO: 8358 - DNA, 230 bp, synthetic construct
  misc_feature 1..230: note = promoter
  source 1..230: mol_type = other DNA
gagggcctatttcccatgagtccttcatatgatgcaagaatgttagagagataattagaattaatttggctgtaaacataaagatattagtacaaaatattgatgcagaaagtaataatttattgggtagtttgtaattttaaaattatgttttaaaatggactatgacatacttaccgtaagtgtaaagtatttctatttcttgcctttatataccttctggcaaggac

SEQ ID NO: 8359 - DNA, 230 bp, synthetic construct
  misc_feature 1..230: note = promoter
  source 1..230: mol_type = other DNA
gagggcctatttcccatgagtccttcatattatgcaagaatgttagagagataattagaattaatttggctgtaaacataaagatattagtacaaaatattgatgcagaaagtaataatttattgggtagtttgtaattttaaaattatgttttaaaatggactatgacatacttaccgtaagtgtaaagtatttctatttcttgcctttatataccttctggcaaggac

SEQ ID NO: 8360 - DNA, 230 bp, synthetic construct
  misc_feature 1..230: note = promoter
  source 1..230: mol_type = other DNA
gagggcctatttcccatgagtccttcatattttgcaagaatgttagagagataattagaattaatttggctgtaaacataaagatattagtacaaaatattgatgcagaaagtaataatttattgggtagtttgtaattttaaaattatgttttaaaatggactatgacatacttaccgtaagtgtaaagtatttctatttcttgcctttatataccttctggcaaggac

SEQ ID NO: 8361 - DNA, 230 bp, synthetic construct
  misc_feature 1..230: note = promoter
  source 1..230: mol_type = other DNA
gagggcctatttcccatgagtccttcatatttggcaagaatgttagagagataattagaattaatttggctgtaaacataaagatattagtacaaaatattgatgcagaaagtaataatttattgggtagtttgtaattttaaaattatgttttaaaatggactatgacatacttaccgtaagtgtaaagtatttctatttcttgcctttatataccttctggcaaggac

SEQ ID NO: 8362 - DNA, 230 bp, synthetic construct
  misc_feature 1..230: note = promoter
  source 1..230: mol_type = other DNA
gagggcctatttcccatgagtccttcatatttgccaagaatgttagagagataattagaattaatttggctgtaaacataaagatattagtacaaaatattgatgcagaaagtaataatttattgggtagtttgtaattttaaaattatgttttaaaatggactatgacatacttaccgtaagtgtaaagtatttctatttcttgcctttatataccttctggcaaggac

SEQ ID NO: 8363 - DNA, 230 bp, synthetic construct
  misc_feature 1..230: note = promoter
  source 1..230: mol_type = other DNA
gagggcctatttcccatgagtccttcatatttgcaaagaatgttagagagataattagaattaatttggctgtaaacataaagatattagtacaaaatattgatgcagaaagtaataatttattgggtagtttgtaattttaaaattatgttttaaaatggactatgacatacttaccgtaagtgtaaagtatttctatttcttgcctttatataccttctggcaaggac

SEQ ID NO: 8364 - DNA, 230 bp, synthetic construct
  misc_feature 1..230: note = promoter
  source 1..230: mol_type = other DNA
gagggcctatttcccatgagtccttcatatttgcatagaatgttagagagataattagaattaatttggctgtaaacataaagatattagtacaaaatattgatgcagaaagtaataatttattgggtagtttgtaattttaaaattatgttttaaaatggactatgacatacttaccgtaagtgtaaagtatttctatttcttgcctttatataccttctggcaaggac

SEQ ID NO: 8365 - DNA, 230 bp, synthetic construct; identical to SEQ ID NO: 8364
  misc_feature 1..230: note = promoter
  source 1..230: mol_type = other DNA

SEQ ID NO: 8366 - DNA, 230 bp, synthetic construct
  misc_feature 1..230: note = promoter
  source 1..230: mol_type = other DNA
gagggcctatttcccatgagtccttcatatttgcatataatgttagagagataattagaattaatttggctgtaaacataaagatattagtacaaaatattgatgcagaaagtaataatttattgggtagtttgtaattttaaaattatgttttaaaatggactatgacatacttaccgtaagtgtaaagtatttctatttcttgcctttatataccttctggcaaggac

SEQ ID NO: 8367 - DNA, 230 bp, synthetic construct; identical to SEQ ID NO: 8366
  misc_feature 1..230: note = promoter
  source 1..230: mol_type = other DNA

SEQ ID NO: 8368 - DNA, 230 bp, synthetic construct
  misc_feature 1..230: note = promoter
  source 1..230: mol_type = other DNA
gagggcctatttcccatgagtccttcatatttgcatatactgttagagagataattagaattaatttggctgtaaacataaagatattagtacaaaatattgatgcagaaagtaataatttattgggtagtttgtaattttaaaattatgttttaaaatggactatgacatacttaccgtaagtgtaaagtatttctatttcttgcctttatataccttctggcaaggac

SEQ ID NO: 8369 - DNA, 230 bp, synthetic construct
  misc_feature 1..230: note = promoter
  source 1..230: mol_type = other DNA
gagggcctatttcccatgagtccttcatatttgcatatacggttagagagataattagaattaatttggctgtaaacataaagatattagtacaaaatattgatgcagaaagtaataatttattgggtagtttgtaattttaaaattatgttttaaaatggactatgacatacttaccgtaagtgtaaagtatttctatttcttgcctttatataccttctggcaaggac

SEQ ID NO: 8370 - DNA, 230 bp, synthetic construct
  misc_feature 1..230: note = promoter
  source 1..230: mol_type = other DNA
gagggcctatttcccatgagtccttcatatttgcatatacgattagagagataattagaattaatttggctgtaaacataaagatattagtacaaaatattgatgcagaaagtaataatttattgggtagtttgtaattttaaaattatgttttaaaatggactatgacatacttaccgtaagtgtaaagtatttctatttcttgcctttatataccttctggcaaggac

SEQ ID NO: 8371 - DNA, 230 bp, synthetic construct; identical to SEQ ID NO: 8370
  misc_feature 1..230: note = promoter
  source 1..230: mol_type = other DNA

SEQ ID NO: 8372 - DNA, 230 bp, synthetic construct
  misc_feature 1..230: note = promoter
  source 1..230: mol_type = other DNA
gagggcctatttcccatgagtccttcatatttgcatatacgatgagagagataattagaattaatttggctgtaaacataaagatattagtacaaaatattgatgcagaaagtaataatttattgggtagtttgtaattttaaaattatgttttaaaatggactatgacatacttaccgtaagtgtaaagtatttctatttcttgcctttatataccttctggcaaggac

SEQ ID NO: 8373 - DNA, 230 bp, synthetic construct
  misc_feature 1..230: note = promoter
  source 1..230: mol_type = other DNA
gagggcctatttcccatgagtccttcatatttgcatatacgatgcgagagataattagaattaatttggctgtaaacataaagatattagtacaaaatattgatgcagaaagtaataatttattgggtagtttgtaattttaaaattatgttttaaaatggactatgacatacttaccgtaagtgtaaagtatttctatttcttgcctttatataccttctggcaaggac

SEQ ID NO: 8374 - DNA, 230 bp, synthetic construct
  misc_feature 1..230: note = promoter
  source 1..230: mol_type = other DNA
gagggcctatttcccatgagtccttcatatttgcatatacgatgcaagagataattagaattaatttggctgtaaacataaagatattagtacaaaatattgatgcagaaagtaataatttattgggtagtttgtaattttaaaattatgttttaaaatggactatgacatacttaccgtaagtgtaaagtatttctatttcttgcctttatataccttctggcaaggac

SEQ ID NO: 8375 - DNA, 230 bp, synthetic construct; identical to SEQ ID NO: 8374
  misc_feature 1..230: note = promoter
  source 1..230: mol_type = other DNA

SEQ ID NO: 8376 - DNA, 230 bp, synthetic construct; identical to SEQ ID NO: 8374
  misc_feature 1..230: note = promoter
  source 1..230: mol_type = other DNA

SEQ ID NO: 8377 - DNA, 230 bp, synthetic construct; identical to SEQ ID NO: 8374
  misc_feature 1..230: note = promoter
  source 1..230: mol_type = other DNA

SEQ ID NO: 8378 - DNA, 230 bp, synthetic construct
  misc_feature 1..230: note = promoter
  source 1..230: mol_type = other DNA
gagggcctatttcccatgagtccttcatatttgcatatacgatgcaagaaataattagaattaatttggctgtaaacataaagatattagtacaaaatattgatgcagaaagtaataatttattgggtagtttgtaattttaaaattatgttttaaaatggactatgacatacttaccgtaagtgtaaagtatttctatttcttgcctttatataccttctggcaaggac

SEQ ID NO: 8379 - DNA, 230 bp, synthetic construct
  misc_feature 1..230: note = promoter
  source 1..230: mol_type = other DNA
gagggcctatttcccatgagtccttcatatttgcatatacgatgcaagaattaattagaattaatttggctgtaaacataaagatattagtacaaaatattgatgcagaaagtaataatttattgggtagtttgtaattttaaaattatgttttaaaatggactatgacatacttaccgtaagtgtaaagtatttctatttcttgcctttatataccttctggcaaggac

SEQ ID NO: 8380 - DNA, 230 bp, synthetic construct
  misc_feature 1..230: note = promoter
  source 1..230: mol_type = other DNA
gagggcctatttcccatgagtccttcatatttgcatatacgatgcaagaatgaattagaattaatttggctgtaaacataaagatattagtacaaaatattgatgcagaaagtaataatttattgggtagtttgtaattttaaaattatgttttaaaatggactatgacatacttaccgtaagtgtaaagtatttctatttcttgcctttatataccttctggcaaggac

SEQ ID NO: 8381 - DNA, 230 bp, synthetic construct
  misc_feature 1..230: note = promoter
  source 1..230: mol_type = other DNA
gagggcctatttcccatgagtccttcatatttgcatatacgatgcaagaatgtattagaattaatttggctgtaaacataaagatattagtacaaaatattgatgcagaaagtaataatttattgggtagtttgtaattttaaaattatgttttaaaatggactatgacatacttaccgtaagtgtaaagtatttctatttcttgcctttatataccttctggcaaggac

SEQ ID NO: 8382 - DNA, 230 bp, synthetic construct
  misc_feature 1..230: note = promoter
  source 1..230: mol_type = other DNA
gagggcctatttcccatgagtccttcatatttgcatatacgatgcaagaatgttttagaattaatttggctgtaaacataaagatattagtacaaaatattgatgcagaaagtaataatttattgggtagtttgtaattttaaaattatgttttaaaatggactatgacatacttaccgtaagtgtaaagtatttctatttcttgcctttatataccttctggcaaggac

SEQ ID NO: 8383 - DNA, 230 bp, synthetic construct
  misc_feature 1..230: note = promoter
  source 1..230: mol_type = other DNA
gagggcctatttcccatgagtccttcatatttgcatatacgatgcaagaatgttatagaattaatttggctgtaaacataaagatattagtacaaaatattgatgcagaaagtaataatttattgggtagtttgtaattttaaaattatgttttaaaatggactatgacatacttaccgtaagtgtaaagtatttctatttcttgcctttatataccttctggcaaggac

SEQ ID NO: 8384 - DNA, 230 bp, synthetic construct
  misc_feature 1..230: note = promoter
  source 1..230: mol_type = other DNA
gagggcctatttcccatgagtccttcatatttgcatatacgatgcaagaatgttagagaattaatttggctgtaaacataaagatattagtacaaaatattgatgcagaaagtaataatttattgggtagtttgtaattttaaaattatgttttaaaatggactatgacatacttaccgtaagtgtaaagtatttctatttcttgcctttatataccttctggcaaggac

SEQ ID NO: 8385 - DNA, 230 bp, synthetic construct; identical to SEQ ID NO: 8384
  misc_feature 1..230: note = promoter
  source 1..230: mol_type = other DNA

SEQ ID NO: 8386 - DNA, 230 bp, synthetic construct; identical to SEQ ID NO: 8384
  misc_feature 1..230: note = promoter
  source 1..230: mol_type = other DNA

SEQ ID NO: 8387 - DNA, 230 bp, synthetic construct; identical to SEQ ID NO: 8384
  misc_feature 1..230: note = promoter
  source 1..230: mol_type = other DNA

SEQ ID NO: 8388 - DNA, 230 bp, synthetic construct
  misc_feature 1..230: note = promoter
  source 1..230: mol_type = other DNA
gagggcctatttcccatgagtccttcatatttgcatatacgatgcaagaatgttagagagttaatttggctgtaaacataaagatattagtacaaaatattgatgcagaaagtaataatttattgggtagtttgtaattttaaaattatgttttaaaatggactatgacatacttaccgtaagtgtaaagtatttctatttcttgcctttatataccttctggcaaggac

SEQ ID NO: 8389 - DNA, 230 bp, synthetic construct
  misc_feature 1..230: note = promoter
  source 1..230: mol_type = other DNA
gagggcctatttcccatgagtccttcatatttgcatatacgatgcaagaatgttagagagataatttggctgtaaacataaagatattagtacaaaatattgatgcagaaagtaataatttattgggtagtttgtaattttaaaattatgttttaaaatggactatgacatacttaccgtaagtgtaaagtatttctatttcttgcctttatataccttctggcaaggac

SEQ ID NO: 8390 - DNA, 230 bp, synthetic construct; identical to SEQ ID NO: 8389
  misc_feature 1..230: note = promoter
  source 1..230: mol_type = other DNA

SEQ ID NO: 8391 - DNA, 230 bp, synthetic construct; identical to SEQ ID NO: 8389
  misc_feature 1..230: note = promoter
  source 1..230: mol_type = other DNA

SEQ ID NO: 8392 - DNA, 230 bp, synthetic construct; identical to SEQ ID NO: 8389
  misc_feature 1..230: note = promoter
  source 1..230: mol_type = other DNA

SEQ ID NO: 8393 - DNA, 230 bp, synthetic construct; identical to SEQ ID NO: 8389
  misc_feature 1..230: note = promoter
  source 1..230: mol_type = other DNA

SEQ ID NO: 8394 - DNA, 230 bp, synthetic construct; identical to SEQ ID NO: 8389
  misc_feature 1..230: note = promoter
  source 1..230: mol_type = other DNA

SEQ ID NO: 8395 - DNA, 230 bp, synthetic construct
  misc_feature 1..230: note = promoter
  source 1..230: mol_type = other DNA
gagggcctatttcccatgagtccttcatatttgcatatacgatgcaagaatgttagagagataattaggctgtaaacataaagatattagtacaaaatattgatgcagaaagtaataatttattgggtagtttgtaattttaaaattatgttttaaaatggactatgacatacttaccgtaagtgtaaagtatttctatttcttgcctttatataccttctggcaaggac

SEQ ID NO: 8396 - DNA, 230 bp, synthetic construct; identical to SEQ ID NO: 8395
  misc_feature 1..230: note = promoter
  source 1..230: mol_type = other DNA

SEQ ID NO: 8397 - DNA, 230 bp, synthetic construct
  misc_feature 1..230: note = promoter
  source 1..230: mol_type = other DNA
gagggcctatttcccatgagtccttcatatttgcatatacgatgcaagaatgttagagagataattagactgtaaacataaagatattagtacaaaatattgatgcagaaagtaataatttattgggtagtttgtaattttaaaattatgttttaaaatggactatgacatacttaccgtaagtgtaaagtatttctatttcttgcctttatataccttctggcaaggac

SEQ ID NO: 8398 - DNA, 230 bp, synthetic construct
  misc_feature 1..230: note = promoter
  source 1..230: mol_type = other DNA
gagggcctatttcccatgagtccttcatatttgcatatacgatgcaagaatgttagagagataattagaatgtaaacataaagatattagtacaaaatattgatgcagaaagtaataatttattgggtagtttgtaattttaaaattatgttttaaaatggactatgacatacttaccgtaagtgtaaagtatttctatttcttgcctttatataccttctggcaaggac

SEQ ID NO: 8399 - DNA, 230 bp, synthetic construct; identical to SEQ ID NO: 8398
  misc_feature 1..230: note = promoter
  source 1..230: mol_type = other DNA

SEQ ID NO: 8400 - DNA, 230 bp, synthetic construct
  misc_feature 1..230: note = promoter
  source 1..230: mol_type = other DNA
gagggcctatttcccatgagtccttcatatttgcatatacgatgcaagaatgttagagagataattagaatttaaacataaagatattagtacaaaatattgatgcagaaagtaataatttattgggtagtttgtaattttaaaattatgttttaaaatggactatgacatacttaccgtaagtgtaaagtatttctatttcttgcctttatataccttctggcaaggac

SEQ ID NO: 8401 - DNA, 230 bp, synthetic construct
  misc_feature 1..230: note = promoter
  source 1..230: mol_type = other DNA
gagggcctatttcccatgagtccttcatatttgcatatacgatgcaagaatgttagagagataattagaattaaaacataaagatattagtacaaaatattgatgcagaaagtaataatttattgggtagtttgtaattttaaaattatgttttaaaatggactatgacatacttaccgtaagtgtaaagtatttctatttcttgcctttatataccttctggcaaggac

SEQ ID NO: 8402 - DNA, 230 bp, synthetic construct; identical to SEQ ID NO: 8401
  misc_feature 1..230: note = promoter
  source 1..230: mol_type = other DNA

SEQ ID NO: 8403 - DNA, 230 bp, synthetic construct
  misc_feature 1..230: note = promoter
  source 1..230: mol_type = other DNA
gagggcctatttcccatgagtccttcatatttgcatatacgatgcaagaatgttagagagataattagaattaatacataaagatattagtacaaaatattgatgcagaaagtaataatttattgggtagtttgtaattttaaaattatgttttaaaatggactatgacatacttaccgtaagtgtaaagtatttctatttcttgcctttatataccttctggcaaggac

SEQ ID NO: 8404 - DNA, 230 bp, synthetic construct
  misc_feature 1..230: note = promoter
  source 1..230: mol_type = other DNA
gagggcctatttcccatgagtccttcatatttgcatatacgatgcaagaatgttagagagataattagaattaattcataaagatattagtacaaaatattgatgcagaaagtaataatttattgggtagtttgtaattttaaaattatgttttaaaatggactatgacatacttaccgtaagtgtaaagtatttctatttcttgcctttatataccttctggcaaggac

SEQ ID NO: 8405 - DNA, 230 bp, synthetic construct
  misc_feature 1..230: note = promoter
  source 1..230: mol_type = other DNA
gagggcctatttcccatgagtccttcatatttgcatatacgatgcaagaatgttagagagataattagaattaatttataaagatattagtacaaaatattgatgcagaaagtaataatttattgggtagtttgtaattttaaaattatgttttaaaatggactatgacatacttaccgtaagtgtaaagtatttctatttcttgcctttatataccttctggcaaggac

SEQ ID NO: 8406 - DNA, 230 bp, synthetic construct
  misc_feature 1..230: note = promoter
  source 1..230: mol_type = other DNA
gagggcctatttcccatgagtccttcatatttgcatatacgatgcaagaatgttagagagataattagaattaatttgtaaagatattagtacaaaatattgatgcagaaagtaataatttattgggtagtttgtaattttaaaattatgttttaaaatggactatgacatacttaccgtaagtgtaaagtatttctatttcttgcctttatataccttctggcaaggac

SEQ ID NO: 8407 - DNA, 230 bp, synthetic construct
  misc_feature 1..230: note = promoter
  source 1..230: mol_type = other DNA
gagggcctatttcccatgagtccttcatatttgcatatacgatgcaagaatgttagagagataattagaattaatttggaaagatattagtacaaaatattgatgcagaaagtaataatttattgggtagtttgtaattttaaaattatgttttaaaatggactatgacatacttaccgtaagtgtaaagtatttctatttcttgcctttatataccttctggcaaggac

SEQ ID NO: 8408 - DNA, 230 bp, synthetic construct
  misc_feature 1..230: note = promoter
  source 1..230: mol_type = other DNA
gagggcctatttcccatgagtccttcatatttgcatatacgatgcaagaatgttagagagataattagaattaatttggcaagatattagtacaaaatattgatgcagaaagtaataatttattgggtagtttgtaattttaaaattatgttttaaaatggactatgacatacttaccgtaagtgtaaagtatttctatttcttgcctttatataccttctggcaaggac

SEQ ID NO: 8409 - DNA, 230 bp, synthetic construct
  misc_feature 1..230: note = promoter
  source 1..230: mol_type = other DNA
gagggcctatttcccatgagtccttcatatttgcatatacgatgcaagaatgttagagagataattagaattaatttggctagatattagtacaaaatattgatgcagaaagtaataatttattgggtagtttgtaattttaaaattatgttttaaaatggactatgacatacttaccgtaagtgtaaagtatttctatttcttgcctttatataccttctggcaaggac

SEQ ID NO: 8410 - DNA, 230 bp, synthetic construct
  misc_feature 1..230: note = promoter
  source 1..230: mol_type = other DNA
gagggcctatttcccatgagtccttcatatttgcatatacgatgcaagaatgttagagagataattagaattaatttggctggatattagtacaaaatattgatgcagaaagtaataatttattgggtagtttgtaattttaaaattatgttttaaaatggactatgacatacttaccgtaagtgtaaagtatttctatttcttgcctttatataccttctggcaaggac

SEQ ID NO: 8411 - DNA, 230 bp, synthetic construct
  misc_feature 1..230: note = promoter
  source 1..230: mol_type = other DNA
gagggcctatttcccatgagtccttcatatttgcatatacgatgcaagaatgttagagagataattagaattaatttggctgtatattagtacaaaatattgatgcagaaagtaataatttattgggtagtttgtaattttaaaattatgttttaaaatggactatgacatacttaccgtaagtgtaaagtatttctatttcttgcctttatataccttctggcaaggac

SEQ ID NO: 8412 - DNA, 230 bp, synthetic construct; identical to SEQ ID NO: 8411
  misc_feature 1..230: note = promoter
  source 1..230: mol_type = other DNA

SEQ ID NO: 8413 - DNA, 230 bp, synthetic construct
  misc_feature 1..230: note = promoter
  source 1..230: mol_type = other DNA
gagggcctatttcccatgagtccttcatatttgcatatacgatgcaagaatgttagagagataattagaattaatttggctgtaaattagtacaaaatattgatgcagaaagtaataatttattgggtagtttgtaattttaaaattatgttttaaaatggactatgacatacttaccgtaagtgtaaagtatttctatttcttgcctttatataccttctggcaaggac

SEQ ID NO: 8414 - DNA, 230 bp, synthetic construct; identical to SEQ ID NO: 8413
  misc_feature 1..230: note = promoter
  source 1..230: mol_type = other DNA

SEQ ID NO: 8415 - DNA, 230 bp, synthetic construct
  misc_feature 1..230: note = promoter
  source 1..230: mol_type = other DNA
gagggcctatttcccatgagtccttcatatttgcatatacgatgcaagaatgttagagagataattagaattaatttggctgtaaactagtacaaaatattgatgcagaaagtaataatttattgggtagtttgtaattttaaaattatgttttaaaatggactatgacatacttaccgtaagtgtaaagtatttctatttcttgcctttatataccttctggcaaggac

SEQ ID NO: 8416 - DNA, 230 bp, synthetic construct
  misc_feature 1..230: note = promoter
  source 1..230: mol_type = other DNA
gagggcctatttcccatgagtccttcatatttgcatatacgatgcaagaatgttagagagataattagaattaatttggctgtaaacaagtacaaaatattgatgcagaaagtaataatttattgggtagtttgtaattttaaaattatgttttaaaatggactatgacatacttaccgtaagtgtaaagtatttctatttcttgcctttatataccttctggcaaggac

SEQ ID NO: 8417 - DNA, 230 bp, synthetic construct
  misc_feature 1..230: note = promoter
  source 1..230: mol_type = other DNA
gagggcctatttcccatgagtccttcatatttgcatatacgatgcaagaatgttagagagataattagaattaatttggctgtaaacatgtacaaaatattgatgcagaaagtaataatttattgggtagtttgtaattttaaaattatgttttaaaatggactatgacatacttaccgtaagtgtaaagtatttctatttcttgcctttatataccttctggcaaggac

SEQ ID NO: 8418 - DNA, 230 bp, synthetic construct
  misc_feature 1..230: note = promoter
  source 1..230: mol_type = other DNA
gagggcctatttcccatgagtccttcatatttgcatatacgatgcaagaatgttagagagataattagaattaatttggctgtaaacatatacaaaatattgatgcagaaagtaataatttattgggtagtttgtaattttaaaattatgttttaaaatggactatgacatacttaccgtaagtgtaaagtatttctatttcttgcctttatataccttctggcaaggac

SEQ ID NO: 8419 - DNA, 230 bp, synthetic construct
  misc_feature 1..230: note = promoter
  source 1..230: mol_type = other DNA
gagggcctatttcccatgagtccttcatatttgcatatacgatgcaagaatgttagagagataattagaattaatttggctgtaaacataaacaaaatattgatgcagaaagtaataatttattgggtagtttgtaattttaaaattatgttttaaaatggactatgacatacttaccgtaagtgtaaagtatttctatttcttgcctttatataccttctggcaaggac

SEQ ID NO: 8420 - DNA, 230 bp, synthetic construct; identical to SEQ ID NO: 8419
  misc_feature 1..230: note = promoter
  source 1..230: mol_type = other DNA

SEQ ID NO: 8421 - DNA, 230 bp, synthetic construct
  misc_feature 1..230: note = promoter
  source 1..230: mol_type = other DNA
gagggcctatttcccatgagtccttcatatttgcatatacgatgcaagaatgttagagagataattagaattaatttggctgtaaacataaagaaaatattgatgcagaaagtaataatttattgggtagtttgtaattttaaaattatgttttaaaatggactatgacatacttaccgtaagtgtaaagtatttctatttcttgcctttatataccttctggcaaggac

SEQ ID NO: 8422 - DNA, 230 bp, synthetic construct; identical to SEQ ID NO: 8421
  misc_feature 1..230: note = promoter
  source 1..230: mol_type = other DNA

SEQ ID NO: 8423 - DNA, 230 bp, synthetic construct
  misc_feature 1..230: note = promoter
  source 1..230: mol_type = other DNA
gagggcctatttcccatgagtccttcatatttgcatatacgatgcaagaatgttagagagataattagaattaatttggctgtaaacataaagataatattgatgcagaaagtaataatttattgggtagtttgtaattttaaaattatgttttaaaatggactatgacatacttaccgtaagtgtaaagtatttctatttcttgcctttatataccttctggcaaggac

SEQ ID NO: 8424 - DNA, 230 bp, synthetic construct; identical to SEQ ID NO: 8423
  misc_feature 1..230: note = promoter
  source 1..230: mol_type = other DNA

SEQ ID NO: 8425 - DNA, 230 bp, synthetic construct
  misc_feature 1..230: note = promoter
  source 1..230: mol_type = other DNA
gagggcctatttcccatgagtccttcatatttgcatatacgatgcaagaatgttagagagataattagaattaatttggctgtaaacataaagatattattgatgcagaaagtaataatttattgggtagtttgtaattttaaaattatgttttaaaatggactatgacatacttaccgtaagtgtaaagtatttctatttcttgcctttatataccttctggcaaggac

SEQ ID NO: 8426 - DNA, 230 bp, synthetic construct; identical to SEQ ID NO: 8425
  misc_feature 1..230: note = promoter
  source 1..230: mol_type = other DNA

SEQ ID NO: 8427 - DNA, 230 bp, synthetic construct; identical to SEQ ID NO: 8425
  misc_feature 1..230: note = promoter
  source 1..230: mol_type = other DNA

SEQ ID NO: 8428 - DNA, 230 bp, synthetic construct
  misc_feature 1..230: note = promoter
  source 1..230: mol_type = other DNA
gagggcctatttcccatgagtccttcatatttgcatatacgatgcaagaatgttagagagataattagaattaatttggctgtaaacataaagatattagtgatgcagaaagtaataatttattgggtagtttgtaattttaaaattatgttttaaaatggactatgacatacttaccgtaagtgtaaagtatttctatttcttgcctttatataccttctggcaaggac

SEQ ID NO: 8429 - DNA, 230 bp, synthetic construct; identical to SEQ ID NO: 8428
  misc_feature 1..230: note = promoter
  source 1..230: mol_type = other DNA

SEQ ID NO: 8430 - DNA, 230 bp, synthetic construct
  misc_feature 1..230: note = promoter
  source 1..230: mol_type = other DNA
gagggcctatttcccatgagtccttcatatttgcatatacgatgcaagaatgttagagagataattagaattaatttggctgtaaacataaagatattagtaatgcagaaagtaataatttattgggtagtttgtaattttaaaattatgttttaaaatggactatgacatacttaccgtaagtgtaaagtatttctatttcttgcctttatataccttctggcaaggac

SEQ ID NO: 8431 - DNA, 230 bp, synthetic construct
  misc_feature 1..230: note = promoter
  source 1..230: mol_type = other DNA
gagggcctatttcccatgagtccttcatatttgcatatacgatgcaagaatgttagagagataattagaattaatttggctgtaaacataaagatattagtactgcagaaagtaataatttattgggtagtttgtaattttaaaattatgttttaaaatggactatgacatacttaccgtaagtgtaaagtatttctatttcttgcctttatataccttctggcaaggac

SEQ ID NO: 8432 - DNA, 230 bp, synthetic construct
  misc_feature 1..230: note = promoter
  source 1..230: mol_type = other DNA
gagggcctatttcccatgagtccttcatatttgcatatacgatgcaagaatgttagagagataattagaattaatttggctgtaaacataaagatattagtacagcagaaagtaataatttattgggtagtttgtaattttaaaattatgttttaaaatggactatgacatacttaccgtaagtgtaaagtatttctatttcttgcctttatataccttctggcaaggac

SEQ ID NO: 8433 - DNA, 230 bp, synthetic construct
  misc_feature 1..230: note = promoter
  source 1..230: mol_type = other DNA
gagggcctatttcccatgagtccttcatatttgcatatacgatgcaagaatgttagagagataattagaattaatttggctgtaaacataaagatattagtacaacagaaagtaataatttattgggtagtttgtaattttaaaattatgttttaaaatggactatgacatacttaccgtaagtgtaaagtatttctatttcttgcctttatataccttctggcaaggac

SEQ ID NO: 8434 - DNA, 230 bp, synthetic construct
  misc_feature 1..230: note = promoter
  source 1..230: mol_type = other DNA
gagggcctatttcccatgagtccttcatatttgcatatacgatgcaagaatgttagagagataattagaattaatttggctgtaaacataaagatattagtacaaaagaaagtaataatttattgggtagtttgtaattttaaaattatgttttaaaatggactatgacatacttaccgtaagtgtaaagtatttctatttcttgcctttatataccttctggcaaggac

SEQ ID NO: 8435 - DNA, 230 bp, synthetic construct; identical to SEQ ID NO: 8434
  misc_feature 1..230: note = promoter
  source 1..230: mol_type = other DNA

SEQ ID NO: 8436 - DNA, 230 bp, synthetic construct
  misc_feature 1..230: note = promoter
  source 1..230: mol_type = other DNA
gagggcctatttcccatgagtccttcatatttgcatatacgatgcaagaatgttagagagataattagaattaatttggctgtaaacataaagatattagtacaaaataaagtaataatttattgggtagtttgtaattttaaaattatgttttaaaatggactatgacatacttaccgtaagtgtaaagtatttctatttcttgcctttatataccttctggcaaggac

SEQ ID NO: 8437 - DNA, 230 bp, synthetic construct; identical to SEQ ID NO: 8436
  misc_feature 1..230: note = promoter
  source 1..230: mol_type = other DNA

SEQ ID NO: 8438 - DNA, 230 bp, synthetic construct
  misc_feature 1..230: note = promoter
  source 1..230: mol_type = other DNA
gagggcctatttcccatgagtccttcatatttgcatatacgatgcaagaatgttagagagataattagaattaatttggctgtaaacataaagatattagtacaaaatatagtaataatttattgggtagtttgtaattttaaaattatgttttaaaatggactatgacatacttaccgtaagtgtaaagtatttctatttcttgcctttatataccttctggcaaggac

SEQ ID NO: 8439 - DNA, 230 bp, synthetic construct
  misc_feature 1..230: note = promoter
  source 1..230: mol_type = other DNA
gagggcctatttcccatgagtccttcatatttgcatatacgatgcaagaatgttagagagataattagaattaatttggctgtaaacataaagatattagtacaaaatattgtaataatttattgggtagtttgtaattttaaaattatgttttaaaatggactatgacatacttaccgtaagtgtaaagtatttctatttcttgcctttatataccttctggcaaggac

SEQ ID NO: 8440 - DNA, 230 bp, synthetic construct; identical to SEQ ID NO: 8439
  misc_feature 1..230: note = promoter
  source 1..230: mol_type = other DNA

SEQ ID NO: 8441 - DNA, 230 bp, synthetic construct
  misc_feature 1..230: note = promoter
  source 1..230: mol_type = other DNA
gagggcctatttcccatgagtccttcatatttgcatatacgatgcaagaatgttagagagataattagaattaatttggctgtaaacataaagatattagtacaaaatattgaaataatttattgggtagtttgtaattttaaaattatgttttaaaatggactatgacatacttaccgtaagtgtaaagtatttctatttcttgcctttatataccttctggcaaggac

SEQ ID NO: 8442 - DNA, 230 bp, synthetic construct
  misc_feature 1..230: note = promoter
  source 1..230: mol_type = other DNA
gagggcctatttcccatgagtccttcatatttgcatatacgatgcaagaatgttagagagataattagaattaatttggctgtaaacataaagatattagtacaaaatattgatataatttattgggtagtttgtaattttaaaattatgttttaaaatggactatgacatacttaccgtaagtgtaaagtatttctatttcttgcctttatataccttctggcaaggac

SEQ ID NO: 8443 - DNA, 230 bp, synthetic construct
  misc_feature 1..230: note = promoter
  source 1..230: mol_type = other DNA
gagggcctatttcccatgagtccttcatatttgcatatacgatgcaagaatgttagagagataattagaattaatttggctgtaaacataaagatattagtacaaaatattgatgtaatttattgggtagtttgtaattttaaaattatgttttaaaatggactatgacatacttaccgtaagtgtaaagtatttctatttcttgcctttatataccttctggcaaggac

SEQ ID NO: 8444 - DNA, 230 bp, synthetic construct
  misc_feature 1..230: note = promoter
  source 1..230: mol_type = other DNA
gagggcctatttcccatgagtccttcatatttgcatatacgatgcaagaatgttagagagataattagaattaatttggctgtaaacataaagatattagtacaaaatattgatgcaatttattgggtagtttgtaattttaaaattatgttttaaaatggactatgacatacttaccgtaagtgtaaagtatttctatttcttgcctttatataccttctggcaaggac

SEQ ID NO: 8445 - DNA, 230 bp, synthetic construct; identical to SEQ ID NO: 8444
  misc_feature 1..230: note = promoter
  source 1..230: mol_type = other DNA

SEQ ID NO: 8446 - DNA, 230 bp, synthetic construct
  misc_feature 1..230: note = promoter
  source 1..230: mol_type = other DNA
gagggcctatttcccatgagtccttcatatttgcatatacgatgcaagaatgttagagagataattagaattaatttggctgtaaacataaagatattagtacaaaatattgatgcagtttattgggtagtttgtaattttaaaattatgttttaaaatggactatgacatacttaccgtaagtgtaaagtatttctatttcttgcctttatataccttctggcaaggac

SEQ ID NO: 8447 - DNA, 230 bp, synthetic construct
  misc_feature 1..230: note = promoter
  source 1..230: mol_type = other DNA
gagggcctatttcccatgagtccttcatatttgcatatacgatgcaagaatgttagagagataattagaattaatttggctgtaaacataaagatattagtacaaaatattgatgcagattattgggtagtttgtaattttaaaattatgttttaaaatggactatgacatacttaccgtaagtgtaaagtatttctatttcttgcctttatataccttctggcaaggac

SEQ ID NO: 8448 - DNA, 230 bp, synthetic construct
  misc_feature 1..230: note = promoter
  source 1..230: mol_type = other DNA
gagggcctatttcccatgagtccttcatatttgcatatacgatgcaagaatgttagagagataattagaattaatttggctgtaaacataaagatattagtacaaaatattgatgcagaatattgggtagtttgtaattttaaaattatgttttaaaatggactatgacatacttaccgtaagtgtaaagtatttctatttcttgcctttatataccttctggcaaggac

SEQ ID NO: 8449 - DNA, 230 bp, synthetic construct
  misc_feature 1..230: note = promoter
  source 1..230: mol_type = other DNA
gagggcctatttcccatgagtccttcatatttgcatatacgatgcaagaatgttagagagataattagaattaatttggctgtaaacataaagatattagtacaaaatattgatgcagaaaattgggtagtttgtaattttaaaattatgttttaaaatggactatgacatacttaccgtaagtgtaaagtatttctatttcttgcctttatataccttctggcaaggac

SEQ ID NO: 8450 - DNA, 230 bp, synthetic construct
  misc_feature 1..230: note = promoter
  source 1..230: mol_type = other DNA
gagggcctatttcccatgagtccttcatatttgcatatacgatgcaagaatgttagagagataattagaattaatttggctgtaaacataaagatattagtacaaaatattgatgcagaaagttgggtagtttgtaattttaaaattatgttttaaaatggactatgacatacttaccgtaagtgtaaagtatttctatttcttgcctttatataccttctggcaaggac

SEQ ID NO: 8451 - DNA, 230 bp, synthetic construct; identical to SEQ ID NO: 8450
  misc_feature 1..230: note = promoter
  source 1..230: mol_type = other DNA

SEQ ID NO: 8452 - DNA, 230 bp, synthetic construct
  misc_feature 1..230: note = promoter
  source 1..230: mol_type = other DNA
gagggcctatttcccatgagtccttcatatttgcatatacgatgcaagaatgttagagagataattagaattaatttggctgtaaacataaagatattagtacaaaatattgatgcagaaagtagggtagtttgtaattttaaaattatgttttaaaatggactatgacatacttaccgtaagtgtaaagtatttctatttcttgcctttatataccttctggcaaggac

SEQ ID NO: 8453 - DNA, 230 bp, synthetic construct
  misc_feature 1..230: note = promoter
  source 1..230: mol_type = other DNA
gagggcctatttcccatgagtccttcatatttgcatatacgatgcaagaatgttagagagataattagaattaatttggctgtaaacataaagatattagtacaaaatattgatgcagaaagtaaggtagtttgtaattttaaaattatgttttaaaatggactatgacatacttaccgtaagtgtaaagtatttctatttcttgcctttatataccttctggcaaggac

SEQ ID NO: 8454 - DNA, 230 bp, synthetic construct
  misc_feature 1..230: note = promoter
  source 1..230: mol_type = other DNA
gagggcctatttcccatgagtccttcatatttgcatatacgatgcaagaatgttagagagataattagaattaatttggctgtaaacataaagatattagtacaaaatattgatgcagaaagtaatgtagtttgtaattttaaaattatgttttaaaatggactatgacatacttaccgtaagtgtaaagtatttctatttcttgcctttatataccttctggcaaggac

SEQ ID NO: 8455 - DNA, 230 bp, synthetic construct
  misc_feature 1..230: note = promoter
  source 1..230: mol_type = other DNA
gagggcctatttcccatgagtccttcatatttgcatatacgatgcaagaatgttagagagataattagaattaatttggctgtaaacataaagatattagtacaaaatattgatgcagaaagtaatatagtttgtaattttaaaattatgttttaaaatggactatgacatacttaccgtaagtgtaaagtatttctatttcttgcctttatataccttctggcaaggac

SEQ ID NO: 8456 - DNA, 230 bp, synthetic construct
  misc_feature 1..230: note = promoter
  source 1..230: mol_type = other DNA
gagggcctatttcccatgagtccttcatatttgcatatacgatgcaagaatgttagagagataattagaattaatttggctgtaaacataaagatattagtacaaaatattgatgcagaaagtaataaagtttgtaattttaaaattatgttttaaaatggactatgacatacttaccgtaagtgtaaagtatttctatttcttgcctttatataccttctggcaaggac

SEQ ID NO: 8457 - DNA, 230 bp, synthetic construct
  misc_feature 1..230: note = promoter
  source 1..230: mol_type = other DNA
gagggcctatttcccatgagtccttcatatttgcatatacgatgcaagaatgttagagagataattagaattaatttggctgtaaacataaagatattagtacaaaatattgatgcagaaagtaataatgtttgtaattttaaaattatgttttaaaatggactatgacatacttaccgtaagtgtaaagtatttctatttcttgcctttatataccttctggcaaggac

SEQ ID NO: 8458 - DNA, 230 bp, synthetic construct
  misc_feature 1..230: note = promoter
  source 1..230: mol_type = other DNA
gagggcctatttcccatgagtccttcatatttgcatatacgatgcaagaatgttagagagataattagaattaatttggctgtaaacataaagatattagtacaaaatattgatgcagaaagtaataatttttgtaattttaaaattatgttttaaaatggactatgacatacttaccgtaagtgtaaagtatttctatttcttgcctttatataccttctggcaaggac

SEQ ID NO: 8459 - DNA, 230 bp, synthetic construct; identical to SEQ ID NO: 8458
  misc_feature 1..230: note = promoter
  source 1..230: mol_type = other DNA

SEQ ID NO: 8460 - DNA, 230 bp, synthetic construct
  misc_feature 1..230: note = promoter
  source 1..230: mol_type = other DNA
gagggcctatttcccatgagtccttcatatttgcatatacgatgcaagaatgttagagagataattagaattaatttggctgtaaacataaagatattagtacaaaatattgatgcagaaagtaataatttatgtaattttaaaattatgttttaaaatggactatgacatacttaccgtaagtgtaaagtatttctatttcttgcctttatataccttctggcaaggac

SEQ ID NO: 8461 - DNA, 230 bp, synthetic construct; identical to SEQ ID NO: 8460
  misc_feature 1..230: note = promoter
  source 1..230: mol_type = other DNA

SEQ ID NO: 8462 - DNA, 230 bp, synthetic construct
  misc_feature 1..230: note = promoter
  source 1..230: mol_type = other DNA
gagggcctatttcccatgagtccttcatatttgcatatacgatgcaagaatgttagagagataattagaattaatttggctgtaaacataaagatattagtacaaaatattgatgcagaaagtaataatttatttaattttaaaattatgttttaaaatggactatgacatacttaccgtaagtgtaaagtatttctatttcttgcctttatataccttctggcaaggac

SEQ ID NO: 8463 - DNA, 230 bp, synthetic construct
  misc_feature 1..230: note = promoter
  source 1..230: mol_type = other DNA
gagggcctatttcccatgagtccttcatatttgcatatacgatgcaagaatgttagagagataattagaattaatttggctgtaaacataaagatattagtacaaaatattgatgcagaaagtaataatttattgaattttaaaattatgttttaaaatggactatgacatacttaccgtaagtgtaaagtatttctatttcttgcctttatataccttctggcaaggac

SEQ ID NO: 8464 - DNA, 230 bp, synthetic construct
  misc_feature 1..230: note = promoter
  source 1..230: mol_type = other DNA
gagggcctatttcccatgagtccttcatatttgcatatacgatgcaagaatgttagagagataattagaattaatttggctgtaaacataaagatattagtacaaaatattgatgcagaaagtaataatttattggattttaaaattatgttttaaaatggactatgacatacttaccgtaagtgtaaagtatttctatttcttgcctttatataccttctggcaaggac

SEQ ID NO: 8465 - DNA, 230 bp, synthetic construct
  misc_feature 1..230: note = promoter
  source 1..230: mol_type = other DNA
gagggcctatttcccatgagtccttcatatttgcatatacgatgcaagaatgttagagagataattagaattaatttggctgtaaacataaagatattagtacaaaatattgatgcagaaagtaataatttattgggttttaaaattatgttttaaaatggactatgacatacttaccgtaagtgtaaagtatttctatttcttgcctttatataccttctggcaaggac

SEQ ID NO: 8466 - DNA, 230 bp, synthetic construct; identical to SEQ ID NO: 8465
  misc_feature 1..230: note = promoter
  source 1..230: mol_type = other DNA

SEQ ID NO: 8467 - DNA, 230 bp, synthetic construct
  misc_feature 1..230: note = promoter
  source 1..230: mol_type = other DNA
gagggcctatttcccatgagtccttcatatttgcatatacgatgcaagaatgttagagagataattagaattaatttggctgtaaacataaagatattagtacaaaatattgatgcagaaagtaataatttattgggtattaaaattatgttttaaaatggactatgacatacttaccgtaagtgtaaagtatttctatttcttgcctttatataccttctggcaaggac

SEQ ID NO: 8468 - DNA, 230 bp, synthetic construct
  misc_feature 1..230: note = promoter
  source 1..230: mol_type = other DNA
gagggcctatttcccatgagtccttcatatttgcatatacgatgcaagaatgttagagagataattagaattaatttggctgtaaacataaagatattagtacaaaatattgatgcagaaagtaataatttattgggtagtaaaattatgttttaaaatggactatgacatacttaccgtaagtgtaaagtatttctatttcttgcctttatataccttctggcaaggac

SEQ ID NO: 8469 - DNA, 230 bp, synthetic construct; identical to SEQ ID NO: 8468
  misc_feature 1..230: note = promoter
  source 1..230: mol_type = other DNA

SEQ ID NO: 8470 - DNA, 230 bp, synthetic construct
  misc_feature 1..230: note = promoter
  source 1..230: mol_type = other DNA
gagggcctatttcccatgagtccttcatatttgcatatacgatgcaagaatgttagagagataattagaattaatttggctgtaaacataaagatattagtacaaaatattgatgcagaaagtaataatttattgggtagttaaattatgttttaaaatggactatgacatacttaccgtaagtgtaaagtatttctatttcttgcctttatataccttctggcaaggac

SEQ ID NO: 8471 - DNA, 230 bp, synthetic construct
  misc_feature 1..230: note = promoter
  source 1..230: mol_type = other DNA
gagggcctatttcccatgagtccttcatatttgcatatacgatgcaagaatgttagagagataattagaattaatttggctgtaaacataaagatattagtacaaaatattgatgcagaaagtaataatttattgggtagtttaattatgttttaaaatggactatgacatacttaccgtaagtgtaaagtatttctatttcttgcctttatataccttctggcaaggac

SEQ ID NO: 8472 - DNA, 230 bp, synthetic construct
  misc_feature 1..230: note = promoter
  source 1..230: mol_type = other DNA
gagggcctatttcccatgagtccttcatatttgcatatacgatgcaagaatgttagagagataattagaattaatttggctgtaaacataaagatattagtacaaaatattgatgcagaaagtaataatttattgggtagtttgattatgttttaaaatggactatgacatacttaccgtaagtgtaaagtatttctatttcttgcctttatataccttctggcaaggac

SEQ ID NO: 8473 - DNA, 230 bp, synthetic construct
  misc_feature 1..230: note = promoter
  source 1..230: mol_type = other DNA
gagggcctatttcccatgagtccttcatatttgcatatacgatgcaagaatgttagagagataattagaattaatttggctgtaaacataaagatattagtacaaaatattgatgcagaaagtaataatttattgggtagtttgtttatgttttaaaatggactatgacatacttaccgtaagtgtaaagtatttctatttcttgcctttatataccttctggcaaggac

SEQ ID NO: 8474 - DNA, 230 bp, synthetic construct
  misc_feature 1..230: note = promoter
  source 1..230: mol_type = other DNA
gagggcctatttcccatgagtccttcatatttgcatatacgatgcaagaatgttagagagataattagaattaatttggctgtaaacataaagatattagtacaaaatattgatgcagaaagtaataatttattgggtagtttgtatatgttttaaaatggactatgacatacttaccgtaagtgtaaagtatttctatttcttgcctttatataccttctggcaaggac

SEQ ID NO: 8475 - DNA, 230 bp, synthetic construct
  misc_feature 1..230: note = promoter
  source 1..230: mol_type = other DNA
gagggcctatttcccatgagtccttcatatttgcatatacgatgcaagaatgttagagagataattagaattaatttggctgtaaacataaagatattagtacaaaatattgatgcagaaagtaataatttattgggtagtttgtaaatgttttaaaatggactatgacatacttaccgtaagtgtaaagtatttctatttcttgcctttatataccttctggcaaggac

SEQ ID NO: 8476 - DNA, 230 bp, synthetic construct
  misc_feature 1..230: note = promoter
  source 1..230: mol_type = other DNA
gagggcctatttcccatgagtccttcatatttgcatatacgatgcaagaatgttagagagataattagaattaatttggctgtaaacataaagatattagtacaaaatattgatgcagaaagtaataatttattgggtagtttgtaattgttttaaaatggactatgacatacttaccgtaagtgtaaagtatttctatttcttgcctttatataccttctggcaaggac

SEQ ID NO: 8477 - DNA, 230 bp, synthetic construct; identical to SEQ ID NO: 8476
  misc_feature 1..230: note = promoter
  source 1..230: mol_type = other DNA

SEQ ID NO: 8478 - DNA, 230 bp, synthetic construct
  misc_feature 1..230: note = promoter
  source 1..230: mol_type = other DNA
gagggcctatttcccatgagtccttcatatttgcatatacgatgcaagaatgttagagagataattagaattaatttggctgtaaacataaagatattagtacaaaatattgatgcagaaagtaataatttattgggtagtttgtaatttttttaaaatggactatgacatacttaccgtaagtgtaaagtatttctatttcttgcctttatataccttctggcaaggac

SEQ ID NO: 8479 - DNA, 230 bp, synthetic construct; identical to SEQ ID NO: 8478
  misc_feature 1..230: note = promoter
  source 1..230: mol_type = other DNA

SEQ ID NO: 8480 - DNA, 230 bp, synthetic construct
  misc_feature 1..230: note = promoter
  source 1..230: mol_type = other DNA
gagggcctatttcccatgagtccttcatatttgcatatacgatgcaagaatgttagagagataattagaattaatttggctgtaaacataaagatattagtacaaaatattgatgcagaaagtaataatttattgggtagtttgtaattttattaaaatggactatgacatacttaccgtaagtgtaaagtatttctatttcttgcctttatataccttctggcaaggac

SEQ ID NO: 8481 - DNA, 230 bp, synthetic construct
  misc_feature 1..230: note = promoter
  source 1..230: mol_type = other DNA
gagggcctatttcccatgagtccttcatatttgcatatacgatgcaagaatgttagagagataattagaattaatttggctgtaaacataaagatattagtacaaaatattgatgcagaaagtaataatttattgggtagtttgtaattttaataaaatggactatgacatacttaccgtaagtgtaaagtatttctatttcttgcctttatataccttctggcaaggac

SEQ ID NO: 8482 - DNA, 230 bp, synthetic construct
  misc_feature 1..230: note = promoter
  source 1..230: mol_type = other DNA
gagggcctatttcccatgagtccttcatatttgcatatacgatgcaagaatgttagagagataattagaattaatttggctgtaaacataaagatattagtacaaaatattgatgcagaaagtaataatttattgggtagtttgtaattttaaaaaaatggactatgacatacttaccgtaagtgtaaagtatttctatttcttgcctttatataccttctggcaaggac

SEQ ID NO: 8483 - DNA, 230 bp, synthetic construct; identical to SEQ ID NO: 8482
  misc_feature 1..230: note = promoter
  source 1..230: mol_type = other DNA

SEQ ID NO: 8484 - DNA, 230 bp, synthetic construct
  misc_feature 1..230: note = promoter
  source 1..230: mol_type = other DNA
gagggcctatttcccatgagtccttcatatttgcatatacgatgcaagaatgttagagagataattagaattaatttggctgtaaacataaagatattagtacaaaatattgatgcagaaagtaataatttattgggtagtttgtaattttaaaataatggactatgacatacttaccgtaagtgtaaagtatttctatttcttgcctttatataccttctggcaaggac

SEQ ID NO: 8485 - DNA, 230 bp, synthetic construct
  misc_feature 1..230: note = promoter
  source 1..230: mol_type = other DNA
gagggcctatttcccatgagtccttcatatttgcatatacgatgcaagaatgttagagagataattagaattaatttggctgtaaacataaagatattagtacaaaatattgatgcagaaagtaataatttattgggtagtttgtaattttaaaattatggactatgacatacttaccgtaagtgtaaagtatttctatttcttgcctttatataccttctggcaaggac

SEQ ID NO: 8486 - DNA, 230 bp, synthetic construct; identical to SEQ ID NO: 8485
  misc_feature 1..230: note = promoter
  source 1..230: mol_type = other DNA

SEQ ID NO: 8487 - DNA, 230 bp, synthetic construct; identical to SEQ ID NO: 8485
  misc_feature 1..230: note = promoter
  source 1..230: mol_type = other DNA

SEQ ID NO: 8488 - DNA, 230 bp, synthetic construct; identical to SEQ ID NO: 8485
  misc_feature 1..230: note = promoter
  source 1..230: mol_type = other DNA

SEQ ID NO: 8489 - DNA, 230 bp, synthetic construct
  misc_feature 1..230: note = promoter
  source 1..230: mol_type = other DNA
gagggcctatttcccatgagtccttcatatttgcatatacgatgcaagaatgttagagagataattagaattaatttggctgtaaacataaagatattagtacaaaatattgatgcagaaagtaataatttattgggtagtttgtaattttaaaattatgtactatgacatacttaccgtaagtgtaaagtatttctatttcttgcctttatataccttctggcaaggac

SEQ ID NO: 8490 - DNA, 230 bp, synthetic construct
  misc_feature 1..230: note = promoter
  source 1..230: mol_type = other DNA
gagggcctatttcccatgagtccttcatatttgcatatacgatgcaagaatgttagagagataattagaattaatttggctgtaaacataaagatattagtacaaaatattgatgcagaaagtaataatttattgggtagtttgtaattttaaaattatgttctatgacatacttaccgtaagtgtaaagtatttctatttcttgcctttatataccttctggcaaggac

SEQ ID NO: 8491 - DNA, 230 bp, synthetic construct
  misc_feature 1..230: note = promoter
  source 1..230: mol_type = other DNA
gagggcctatttcccatgagtccttcatatttgcatatacgatgcaagaatgttagagagataattagaattaatttggctgtaaacataaagatattagtacaaaatattgatgcagaaagtaataatttattgggtagtttgtaattttaaaattatgttttatgacatacttaccgtaagtgtaaagtatttctatttcttgcctttatataccttctggcaaggac

SEQ ID NO: 8492 - DNA, 230 bp, synthetic construct; identical to SEQ ID NO: 8491
  misc_feature 1..230: note = promoter
  source 1..230: mol_type = other DNA

SEQ ID NO: 8493 - DNA, 230 bp, synthetic construct; identical to SEQ ID NO: 8491
  misc_feature 1..230: note = promoter
  source 1..230: mol_type = other DNA

SEQ ID NO: 8494 - DNA, 230 bp, synthetic construct
  misc_feature 1..230: note = promoter
  source 1..230: mol_type = other DNA
gagggcctatttcccatgagtccttcatatttgcatatacgatgcaagaatgttagagagataattagaattaatttggctgtaaacataaagatattagtacaaaatattgatgcagaaagtaataatttattgggtagtttgtaattttaaaattatgttttaagacatacttaccgtaagtgtaaagtatttctatttcttgcctttatataccttctggcaaggac

SEQ ID NO: 8495 - DNA, 230 bp, synthetic construct
  misc_feature 1..230: note = promoter
  source 1..230: mol_type = other DNA
gagggcctatttcccatgagtccttcatatttgcatatacgatgcaagaatgttagagagataattagaattaatttggctgtaaacataaagatattagtacaaaatattgatgcagaaagtaataatttattgggtagtttgtaattttaaaattatgttttaaaacatacttaccgtaagtgtaaagtatttctatttcttgcctttatataccttctggcaaggac

SEQ ID NO: 8496 - DNA, 230 bp, synthetic construct; identical to SEQ ID NO: 8495
  misc_feature 1..230: note = promoter
  source 1..230: mol_type = other DNA

SEQ ID NO: 8497 - DNA, 230 bp, synthetic construct
  misc_feature 1..230: note = promoter
  source 1..230: mol_type = other DNA
gagggcctatttcccatgagtccttcatatttgcatatacgatgcaagaatgttagagagataattagaattaatttggctgtaaacataaagatattagtacaaaatattgatgcagaaagtaataatttattgggtagtttgtaattttaaaattatgttttaaaatatacttaccgtaagtgtaaagtatttctatttcttgcctttatataccttctggcaaggac

SEQ ID NO: 8498 - DNA, 230 bp, synthetic construct
  misc_feature 1..230: note = promoter
  source 1..230: mol_type = other DNA
gagggcctatttcccatgagtccttcatatttgcatatacgatgcaagaatgttagagagataattagaattaatttggctgtaaacataaagatattagtacaaaatattgatgcagaaagtaataatttattgggtagtttgtaattttaaaattatgttttaaaatgtacttaccgtaagtgtaaagtatttctatttcttgcctttatataccttctggcaaggac

SEQ ID NO: 8499 - DNA, 230 bp, synthetic construct
  misc_feature 1..230: note = promoter
  source 1..230: mol_type = other DNA
gagggcctatttcccatgagtccttcatatttgcatatacgatgcaagaatgttagagagataattagaattaatttggctgtaaacataaagatattagtacaaaatattgatgcagaaagtaataatttattgggtagtttgtaattttaaaattatgttttaaaatggacttaccgtaagtgtaaagtatttctatttcttgcctttatataccttctggcaaggac

SEQ ID NO: 8500 - DNA, 230 bp, synthetic construct; identical to SEQ ID NO: 8499
  misc_feature 1..230: note = promoter
  source 1..230: mol_type = other DNA

SEQ ID NO: 8501 - DNA, 230 bp, synthetic construct; identical to SEQ ID NO: 8499
  misc_feature 1..230: note = promoter
  source 1..230: mol_type = other DNA

SEQ ID NO: 8502 - DNA, 230 bp, synthetic construct; identical to SEQ ID NO: 8499
  misc_feature 1..230: note = promoter
  source 1..230: mol_type = other DNA

SEQ ID NO: 8503 - DNA, 230 bp, synthetic construct
  misc_feature 1..230: note = promoter
  source 1..230: mol_type = other DNA
gagggcctatttcccatgagtccttcatatttgcatatacgatgcaagaatgttagagagataattagaattaatttggctgtaaacataaagatattagtacaaaatattgatgcagaaagtaataatttattgggtagtttgtaattttaaaattatgttttaaaatggactaaccgtaagtgtaaagtatttctatttcttgcctttatataccttctggcaaggac

SEQ ID NO: 8504 - DNA, 230 bp, synthetic construct
  misc_feature 1..230: note = promoter
  source 1..230: mol_type = other DNA
gagggcctatttcccatgagtccttcatatttgcatatacgatgcaagaatgttagagagataattagaattaatttggctgtaaacataaagatattagtacaaaatattgatgcagaaagtaataatttattgggtagtttgtaattttaaaattatgttttaaaatggactatccgtaagtgtaaagtatttctatttcttgcctttatataccttctggcaaggac

SEQ ID NO: 8505 - DNA, 230 bp, synthetic construct
  misc_feature 1..230: note = promoter
  source 1..230: mol_type = other DNA
gagggcctatttcccatgagtccttcatatttgcatatacgatgcaagaatgttagagagataattagaattaatttggctgtaaacataaagatattagtacaaaatattgatgcagaaagtaataatttattgggtagtttgtaattttaaaattatgttttaaaatggactatgcgtaagtgtaaagtatttctatttcttgcctttatataccttctggcaaggac

SEQ ID NO: 8506 - DNA, 230 bp, synthetic construct
  misc_feature 1..230: note = promoter
  source 1..230: mol_type = other DNA
gagggcctatttcccatgagtccttcatatttgcatatacgatgcaagaatgttagagagataattagaattaatttggctgtaaacataaagatattagtacaaaatattgatgcagaaagtaataatttattgggtagtttgtaattttaaaattatgttttaaaatggactatgagtaagtgtaaagtatttctatttcttgcctttatataccttctggcaaggac

SEQ ID NO: 8507 - DNA, 230 bp, synthetic construct
  misc_feature 1..230: note = promoter
  source 1..230: mol_type = other DNA
gagggcctatttcccatgagtccttcatatttgcatatacgatgcaagaatgttagagagataattagaattaatttggctgtaaacataaagatattagtacaaaatattgatgcagaaagtaataatttattgggtagtttgtaattttaaaattatgttttaaaatggactatgactaagtgtaaagtatttctatttcttgcctttatataccttctggcaaggac

SEQ ID NO: 8508 - DNA, 230 bp, synthetic construct
  misc_feature 1..230: note = promoter
  source 1..230: mol_type = other DNA
gagggcctatttcccatgagtccttcatatttgcatatacgatgcaagaatgttagagagataattagaattaatttggctgtaaacataaagatattagtacaaaatattgatgcagaaagtaataatttattgggtagtttgtaattttaaaattatgttttaaaatggactatgacaaagtgtaaagtatttctatttcttgcctttatataccttctggcaaggac

SEQ ID NO: 8509 - DNA, 230 bp, synthetic construct
  misc_feature 1..230: note = promoter
  source 1..230: mol_type = other DNA
gagggcctatttcccatgagtccttcatatttgcatatacgatgcaagaatgttagagagataattagaattaatttggctgtaaacataaagatattagtacaaaatattgatgcagaaagtaataatttattgggtagtttgtaattttaaaattatgttttaaaatggactatgacatagtgtaaagtatttctatttcttgcctttatataccttctggcaaggac

SEQ ID NO: 8510 - DNA, 230 bp, synthetic construct; identical to SEQ ID NO: 8509
  misc_feature 1..230: note = promoter
  source 1..230: mol_type = other DNA

SEQ ID NO: 8511 - DNA, 230 bp, synthetic construct
  misc_feature 1..230: note = promoter
  source 1..230: mol_type = other DNA
gagggcctatttcccatgagtccttcatatttgcatatacgatgcaagaatgttagagagataattagaattaatttggctgtaaacataaagatattagtacaaaatattgatgcagaaagtaataatttattgggtagtttgtaattttaaaattatgttttaaaatggactatgacatactgtaaagtatttctatttcttgcctttatataccttctggcaaggac

SEQ ID NO: 8512 - DNA, 230 bp, synthetic construct; identical to SEQ ID NO: 8511
  misc_feature 1..230: note = promoter
  source 1..230: mol_type = other DNA

SEQ ID NO: 8513 - DNA, 230 bp, synthetic construct
  misc_feature 1..230: note = promoter
  source 1..230: mol_type = other DNA
gagggcctatttcccatgagtccttcatatttgcatatacgatgcaagaatgttagagagataattagaattaatttggctgtaaacataaagatattagtacaaaatattgatgcagaaagtaataatttattgggtagtttgtaattttaaaattatgttttaaaatggactatgacatactttaaagtatttctatttcttgcctttatataccttctggcaaggac

SEQ ID NO: 8514 - DNA, 230 bp, synthetic construct
  misc_feature 1..230: note = promoter
  source 1..230: mol_type = other DNA
gagggcctatttcccatgagtccttcatatttgcatatacgatgcaagaatgttagagagataattagaattaatttggctgtaaacataaagatattagtacaaaatattgatgcagaaagtaataatttattgggtagtttgtaattttaaaattatgttttaaaatggactatgacatacttaaaagtatttctatttcttgcctttatataccttctggcaaggac

SEQ ID NO: 8515 - DNA, 230 bp, synthetic construct
  misc_feature 1..230: note = promoter
  source 1..230: mol_type = other DNA
gagggcctatttcccatgagtccttcatatttgcatatacgatgcaagaatgttagagagataattagaattaatttggctgtaaacataaagatattagtacaaaatattgatgcagaaagtaataatttattgggtagtttgtaattttaaaattatgttttaaaatggactatgacatacttacaagtatttctatttcttgcctttatataccttctggcaaggac

SEQ ID NO: 8516 - DNA, 230 bp, synthetic construct
  misc_feature 1..230: note = promoter
  source 1..230: mol_type = other DNA
gagggcctatttcccatgagtccttcatatttgcatatacgatgcaagaatgttagagagataattagaattaatttggctgtaaacataaagatattagtacaaaatattgatgcagaaagtaataatttattgggtagtttgtaattttaaaattatgttttaaaatggactatgacatacttaccagtatttctatttcttgcctttatataccttctggcaaggac

SEQ ID NO: 8517 - DNA, 230 bp, synthetic construct
  misc_feature 1..230: note = promoter
  source 1..230: mol_type = other DNA
gagggcctatttcccatgagtccttcatatttgcatatacgatgcaagaatgttagagagataattagaattaatttggctgtaaacataaagatattagtacaaaatattgatgcagaaagtaataatttattgggtagtttgtaattttaaaattatgttttaaaatggactatgacatacttaccggtatttctatttcttgcctttatataccttctggcaaggac

SEQ ID NO: 8518 - DNA, 230 bp, synthetic construct
  misc_feature 1..230: note = promoter
  source 1..230: mol_type = other DNA
gagggcctatttcccatgagtccttcatatttgcatatacgatgcaagaatgttagagagataattagaattaatttggctgtaaacataaagatattagtacaaaatattgatgcagaaagtaataatttattgggtagtttgtaattttaaaattatgttttaaaatggactatgacatacttaccgttatttctatttcttgcctttatataccttctggcaaggac

SEQ ID NO: 8519 - DNA, 230 bp, synthetic construct
  misc_feature 1..230: note = promoter
  source 1..230: mol_type = other DNA
gagggcctatttcccatgagtccttcatatttgcatatacgatgcaagaatgttagagagataattagaattaatttggctgtaaacataaagatattagtacaaaatattgatgcagaaagtaataatttattgggtagtttgtaattttaaaattatgttttaaaatggactatgacatacttaccgtaatttctatttcttgcctttatataccttctggcaaggac

SEQ ID NO: 8520 - DNA, 230 bp, synthetic construct; identical to SEQ ID NO: 8519
  misc_feature 1..230: note = promoter
  source 1..230: mol_type = other DNA

SEQ ID NO: 8521 - DNA, 230 bp, synthetic construct
  misc_feature 1..230: note = promoter
  source 1..230: mol_type = other DNA
gagggcctatttcccatgagtccttcatatttgcatatacgatgcaagaatgttagagagataattagaattaatttggctgtaaacataaagatattagtacaaaatattgatgcagaaagtaataatttattgggtagtttgtaattttaaaattatgttttaaaatggactatgacatacttaccgtaagttctatttcttgcctttatataccttctggcaaggac

SEQ ID NO: 8522 - DNA, 230 bp, synthetic construct; identical to SEQ ID NO: 8521
  misc_feature 1..230: note = promoter
  source 1..230: mol_type = other DNA

SEQ ID NO: 8523 - DNA, 230 bp, synthetic construct
  misc_feature 1..230: note = promoter
  source 1..230: mol_type = other DNA
gagggcctatttcccatgagtccttcatatttgcatatacgatgcaagaatgttagagagataattagaattaatttggctgtaaacataaagatattagtacaaaatattgatgcagaaagtaataatttattgggtagtttgtaattttaaaattatgttttaaaatggactatgacatacttaccgtaagtgctatttcttgcctttatataccttctggcaaggac

SEQ ID NO: 8524 - DNA, 230 bp, synthetic construct
  misc_feature 1..230: note = promoter
  source 1..230: mol_type = other DNA
gagggcctatttcccatgagtccttcatatttgcatatacgatgcaagaatgttagagagataattagaattaatttggctgtaaacataaagatattagtacaaaatattgatgcagaaagtaataatttattgggtagtttgtaattttaaaattatgttttaaaatggactatgacatacttaccgtaagtgttatttcttgcctttatataccttctggcaaggac

SEQ ID NO: 8525 - DNA, 230 bp, synthetic construct
  misc_feature 1..230: note = promoter
  source 1..230: mol_type = other DNA
gagggcctatttcccatgagtccttcatatttgcatatacgatgcaagaatgttagagagataattagaattaatttggctgtaaacataaagatattagtacaaaatattgatgcagaaagtaataatttattgggtagtttgtaattttaaaattatgttttaaaatggactatgacatacttaccgtaagtgtaatttcttgcctttatataccttctggcaaggac

SEQ ID NO: 8526 - DNA, 230 bp, synthetic construct; identical to SEQ ID NO: 8525
  misc_feature 1..230: note = promoter
  source 1..230: mol_type = other DNA

SEQ ID NO: 8527 - DNA, 230 bp, synthetic construct
  misc_feature 1..230: note = promoter
  source 1..230: mol_type = other DNA
gagggcctatttcccatgagtccttcatatttgcatatacgatgcaagaatgttagagagataattagaattaatttggctgtaaacataaagatattagtacaaaatattgatgcagaaagtaataatttattgggtagtttgtaattttaaaattatgttttaaaatggactatgacatacttaccgtaagtgtaaattcttgcctttatataccttctggcaaggac

SEQ ID NO: 8528 - DNA, 230 bp, synthetic construct
  misc_feature 1..230: note = promoter
  source 1..230: mol_type = other DNA
gagggcctatttcccatgagtccttcatatttgcatatacgatgcaagaatgttagagagataattagaattaatttggctgtaaacataaagatattagtacaaaatattgatgcagaaagtaataatttattgggtagtttgtaattttaaaattatgttttaaaatggactatgacatacttaccgtaagtgtaaagtcttgcctttatataccttctggcaaggac

SEQ ID NO: 8529 - DNA, 230 bp, synthetic construct; identical to SEQ ID NO: 8528
  misc_feature 1..230: note = promoter
  source 1..230: mol_type = other DNA

SEQ ID NO: 8530 - DNA, 230 bp, synthetic construct
  misc_feature 1..230: note = promoter
  source 1..230: mol_type = other DNA
gagggcctatttcccatgagtccttcatatttgcatatacgatgcaagaatgttagagagataattagaattaatttggctgtaaacataaagatattagtacaaaatattgatgcagaaagtaataatttattgggtagtttgtaattttaaaattatgttttaaaatggactatgacatacttaccgtaagtgtaaagtattgcctttatataccttctggcaaggac

SEQ ID NO: 8531 - DNA, 230 bp, synthetic construct; identical to SEQ ID NO: 8530
  misc_feature 1..230: note = promoter
  source 1..230: mol_type = other DNA

SEQ ID NO: 8532 - DNA, 230 bp, synthetic construct; identical to SEQ ID NO: 8530
  misc_feature 1..230: note = promoter
  source 1..230: mol_type = other DNA

SEQ ID NO: 8533 - DNA, 230 bp, synthetic construct
  misc_feature 1..230: note = promoter
  source 1..230: mol_type = other DNA
gagggcctatttcccatgagtccttcatatttgcatatacgatgcaagaatgttagagagataattagaattaatttggctgtaaacataaagatattagtacaaaatattgatgcagaaagtaataatttattgggtagtttgtaattttaaaattatgttttaaaatggactatgacatacttaccgtaagtgtaaagtatttcctttatataccttctggcaaggac

SEQ ID NO: 8534 - DNA, 230 bp, synthetic construct; identical to SEQ ID NO: 8533
  misc_feature 1..230: note = promoter
  source 1..230: mol_type = other DNA

SEQ ID NO: 8535 - DNA, 230 bp, synthetic construct
  misc_feature 1..230: note = promoter
  source 1..230: mol_type = other DNA
gagggcctatttcccatgagtccttcatatttgcatatacgatgcaagaatgttagagagataattagaattaatttggctgtaaacataaagatattagtacaaaatattgatgcagaaagtaataatttattgggtagtttgtaattttaaaattatgttttaaaatggactatgacatacttaccgtaagtgtaaagtatttcttttatataccttctggcaaggac

SEQ ID NO: 8536 - DNA, 230 bp, synthetic construct
  misc_feature 1..230: note = promoter
  source 1..230: mol_type = other DNA
gagggcctatttcccatgagtccttcatatttgcatatacgatgcaagaatgttagagagataattagaattaatttggctgtaaacataaagatattagtacaaaatattgatgcagaaagtaataatttattgggtagtttgtaattttaaaattatgttttaaaatggactatgacatacttaccgtaagtgtaaagtatttctattatataccttctggcaaggac

SEQ ID NO: 8537 - DNA, 230 bp, synthetic construct; identical to SEQ ID NO: 8536
  misc_feature 1..230: note = promoter
  source 1..230: mol_type = other DNA

SEQ ID NO: 8538 - DNA, 230 bp, synthetic construct; identical to SEQ ID NO: 8536
  misc_feature 1..230: note = promoter
  source 1..230: mol_type = other DNA

SEQ ID NO: 8539 - DNA, 230 bp, synthetic construct
  misc_feature 1..230: note = promoter
  source 1..230: mol_type = other DNA
gagggcctatttcccatgagtccttcatatttgcatatacgatgcaagaatgttagagagataattagaattaatttggctgtaaacataaagatattagtacaaaatattgatgcagaaagtaataatttattgggtagtttgtaattttaaaattatgttttaaaatggactatgacatacttaccgtaagtgtaaagtatttctattttataccttctggcaaggac

SEQ ID NO: 8540 - DNA, 230 bp, synthetic construct
  misc_feature 1..230: note = promoter
  source 1..230: mol_type = other DNA
gagggcctatttcccatgagtccttcatatttgcatatacgatgcaagaatgttagagagataattagaattaatttggctgtaaacataaagatattagtacaaaatattgatgcagaaagtaataatttattgggtagtttgtaattttaaaattatgttttaaaatggactatgacatacttaccgtaagtgtaaagtatttctatttcataccttctggcaaggac

SEQ ID NO: 8541 - DNA, 230 bp, synthetic construct
  misc_feature 1..230: note = promoter
  source 1..230: mol_type = other DNA
gagggcctatttcccatgagtccttcatatttgcatatacgatgcaagaatgttagagagataattagaattaatttggctgtaaacataaagatattagtacaaaatattgatgcagaaagtaataatttattgggtagtttgtaattttaaaattatgttttaaaatggactatgacatacttaccgtaagtgtaaagtatttctatttcttaccttctggcaaggac

SEQ ID NO: 8542 - DNA, 230 bp, synthetic construct; identical to SEQ ID NO: 8541
  misc_feature 1..230: note = promoter
  source 1..230: mol_type = other DNA

SEQ ID NO: 8543 - DNA, 230 bp, synthetic construct
  misc_feature 1..230: note = promoter
  source 1..230: mol_type = other DNA
gagggcctatttcccatgagtccttcatatttgcatatacgatgcaagaatgttagagagataattagaattaatttggctgtaaacataaagatattagtacaaaatattgatgcagaaagtaataatttattgggtagtttgtaattttaaaattatgttttaaaatggactatgacatacttaccgtaagtgtaaagtatttctatttcttgccttctggcaaggac

SEQ ID NO: 8544 - DNA, 230 bp, synthetic construct; identical to SEQ ID NO: 8543
  misc_feature 1..230: note = promoter
  source 1..230: mol_type = other DNA

SEQ ID NO: 8545 - DNA, 230 bp, synthetic construct; identical to SEQ ID NO: 8543
  misc_feature 1..230: note = promoter
  source 1..230: mol_type = other DNA

SEQ ID NO: 8546 - DNA, 230 bp, synthetic construct; identical to SEQ ID NO: 8543
  misc_feature 1..230: note = promoter
  source 1..230: mol_type = other DNA

SEQ ID NO: 8547 - DNA, 230 bp, synthetic construct; identical to SEQ ID NO: 8543
  misc_feature 1..230: note = promoter
  source 1..230: mol_type = other DNA

SEQ ID NO: 8548 - DNA, 230 bp, synthetic construct
  misc_feature 1..230: note = promoter
  source 1..230: mol_type = other DNA
gagggcctatttcccatgagtccttcatatttgcatatacgatgcaagaatgttagagagataattagaattaatttggctgtaaacataaagatattagtacaaaatattgatgcagaaagtaataatttattgggtagtttgtaattttaaaattatgttttaaaatggactatgacatacttaccgtaagtgtaaagtatttctatttcttgccttttggcaaggac

SEQ ID NO: 8549 - DNA, 230 bp, synthetic construct
  misc_feature 1..230: note = promoter
  source 1..230: mol_type = other DNA
gagggcctatttcccatgagtccttcatatttgcatatacgatgcaagaatgttagagagataattagaattaatttggctgtaaacataaagatattagtacaaaatattgatgcagaaagtaataatttattgggtagtttgtaattttaaaattatgttttaaaatggactatgacatacttaccgtaagtgtaaagtatttctatttcttgcctttaggcaaggac

SEQ ID NO: 8550 - DNA, 230 bp, synthetic construct
  misc_feature 1..230: note = promoter
  source 1..230: mol_type = other DNA
gagggcctatttcccatgagtccttcatatttgcatatacgatgcaagaatgttagagagataattagaattaatttggctgtaaacataaagatattagtacaaaatattgatgcagaaagtaataatttattgggtagtttgtaattttaaaattatgttttaaaatggactatgacatacttaccgtaagtgtaaagtatttctatttcttgcctttatgcaaggac

SEQ ID NO: 8551 - DNA, 230 bp, synthetic construct
  misc_feature 1..230: note = promoter
  source 1..230: mol_type = other DNA
gagggcctatttcccatgagtccttcatatttgcatatacgatgcaagaatgttagagagataattagaattaatttggctgtaaacataaagatattagtacaaaatattgatgcagaaagtaataatttattgggtagtttgtaattttaaaattatgttttaaaatggactatgacatacttaccgtaagtgtaaagtatttctatttcttgcctttatacaaggac

SEQ ID NO: 8552 - DNA, 230 bp, synthetic construct
  misc_feature 1..230: note = promoter
  source 1..230: mol_type = other DNA
gagggcctatttcccatgagtccttcatatttgcatatacgatgcaagaatgttagagagataattagaattaatttggctgtaaacataaagatattagtacaaaatattgatgcagaaagtaataatttattgggtagtttgtaattttaaaattatgttttaaaatggactatgacatacttaccgtaagtgtaaagtatttctatttcttgcctttatataaggac

SEQ ID NO: 8553 - DNA, 230 bp, synthetic construct; identical to SEQ ID NO: 8552
  misc_feature 1..230: note = promoter
  source 1..230: mol_type = other DNA

SEQ ID NO: 8554 - DNA, 230 bp, synthetic construct
  misc_feature 1..230: note = promoter
  source 1..230: mol_type = other DNA
gagggcctatttcccatgagtccttcatatttgcatatacgatgcaagaatgttagagagataattagaattaatttggctgtaaacataaagatattagtacaaaatattgatgcagaaagtaataatttattgggtagtttgtaattttaaaattatgttttaaaatggactatgacatacttaccgtaagtgtaaagtatttctatttcttgcctttatatacggac

SEQ ID NO: 8555 - DNA, 230 bp, synthetic construct
  misc_feature 1..230: note = promoter
  source 1..230: mol_type = other DNA
gagggcctatttcccatgagtccttcatatttgcatatacgatgcaagaatgttagagagataattagaattaatttggctgtaaacataaagatattagtacaaaatattgatgcagaaagtaataatttattgggtagtttgtaattttaaaattatgttttaaaatggactatgacatacttaccgtaagtgtaaagtatttctatttcttgcctttatataccgac

SEQ ID NO: 8556 - DNA, 230 bp, synthetic construct
  misc_feature 1..230: note = promoter
  source 1..230: mol_type = other DNA
gagggcctatttcccatgagtccttcatatttgcatatacgatgcaagaatgttagagagataattagaattaatttggctgtaaacataaagatattagtacaaaatattgatgcagaaagtaataatttattgggtagtttgtaattttaaaattatgttttaaaatggactatgacatacttaccgtaagtgtaaagtatttctatttcttgcctttatatacctac

SEQ ID NO: 8557 - DNA, 230 bp, synthetic construct
  misc_feature 1..230: note = promoter
  source 1..230: mol_type = other DNA
gagggcctatttcccatgagtccttcatatttgcatatacgatgcaagaatgttagagagataattagaattaatttggctgtaaacataaagatattagtacaaaatattgatgcagaaagtaataatttattgggtagtttgtaattttaaaattatgttttaaaatggactatgacatacttaccgtaagtgtaaagtatttctatttcttgcctttatataccttc

SEQ ID NO: 8558 - DNA, 230 bp, synthetic construct; identical to SEQ ID NO: 8557
  misc_feature 1..230: note = promoter
  source 1..230: mol_type = other DNA

SEQ ID NO: 8559 - DNA, 231 bp, synthetic construct
  misc_feature 1..231: note = promoter
  source 1..231: mol_type = other DNA
gagggcctatttcccatgagtccttcatatttgcatatacgatgcaagaatgttagagagataattagaattaatttggctgtaaacataaagatattagtacaaaatattgatgcagaaagtaataatttattgggtagtttgtaattttaaaattatgttttaaaatggactatgacatacttaccgtaagtgtaaagtatttctatttcttgcctttatataccttct

SEQ ID NO: 8560 - DNA, 232 bp, synthetic construct
  misc_feature 1..232: note = promoter
  source 1..232: mol_type = other DNA
gagggcctatttcccatgagtccttcatatttgcatatacgatgcaagaatgttagagagataattagaattaatttggctgtaaacataaagatattagtacaaaatattgatgcagaaagtaataatttattgggtagtttgtaattttaaaattatgttttaaaatggactatgacatacttaccgtaagtgtaaagtatttctatttcttgcctttatataccttctg

SEQ ID NO: 8561 - DNA, 233 bp, synthetic construct
  misc_feature 1..233: note = promoter
  source 1..233: mol_type = other DNA
gagggcctatttcccatgagtccttcatatttgcatatacgatgcaagaatgttagagagataattagaattaatttggctgtaaacataaagatattagtacaaaatattgatgcagaaagtaataatttattgggtagtttgtaattttaaaattatgttttaaaatggactatgacatacttaccgtaagtgtaaagtatttctatttcttgcctttatataccttctgg

SEQ ID NO: 8562 - DNA, 234 bp, synthetic construct
  misc_feature 1..234: note = promoter
  source 1..234: mol_type = other DNA
gagggcctatttcccatgagtccttcatatttgcatatacgatgcaagaatgttagagagataattagaattaatttggctgtaaacataaagatattagtacaaaatattgatgcagaaagtaataatttattgggtagtttgtaattttaaaattatgttttaaaatggactatgacatacttaccgtaagtgtaaagtatttctatttcttgcctttatataccttctggc

SEQ ID NO: 8563 - DNA, 235 bp, synthetic construct
  misc_feature 1..235: note = promoter
  source 1..235: mol_type = other DNA
gagggcctatttcccatgagtccttcatatttgcatatacgatgcaagaatgttagagagataattagaattaatttggctgtaaacataaagatattagtacaaaatattgatgcagaaagtaataatttattgggtagtttgtaattttaaaattatgttttaaaatggactatgacatacttaccgtaagtgtaaagtatttctatttcttgcctttatataccttctggca

SEQ ID NO: 8564 - DNA, 236 bp, synthetic construct
  misc_feature 1..236: note = promoter
  source 1..236: mol_type = other DNA
gagggcctatttcccatgagtccttcatatttgcatatacgatgcaagaatgttagagagataattagaattaatttggctgtaaacataaagatattagtacaaaatattgatgcagaaagtaataatttattgggtagtttgtaattttaaaattatgttttaaaatggactatgacatacttaccgtaagtgtaaagtatttctatttcttgcctttatataccttctggcaa

SEQ ID NO: 8565 - DNA, 237 bp, synthetic construct
  misc_feature 1..237: note = promoter
  source 1..237: mol_type = other DNA
gagggcctatttcccatgagtccttcatatttgcatatacgatgcaagaatgttagagagataattagaattaatttggctgtaaacataaagatattagtacaaaatattgatgcagaaagtaataatttattgggtagtttgtaattttaaaattatgttttaaaatggactatgacatacttaccgtaagtgtaaagtatttctatttcttgcctttatataccttctggcaag

SEQ ID NO: 8566 - DNA, 238 bp, synthetic construct; identical to SEQ ID NO: 8326
  misc_feature 1..238: note = promoter
  source 1..238: mol_type = other DNA

SEQ ID NO: 8567 - DNA, 239 bp, synthetic construct; identical to SEQ ID NO: 8327
  misc_feature 1..239: note = promoter
  source 1..239: mol_type = other DNA

SEQ ID NO: 8568 - DNA, 240 bp, synthetic construct; identical to SEQ ID NO: 3609
  misc_feature 1..240: note = promoter
  source 1..240: mol_type = other DNA

SEQ ID NO: 8569 - DNA, 238 bp, synthetic construct
  misc_feature 1..238: note = promoter
  source 1..238: mol_type = other DNA
gggcctatttcccatgagtccttcatatttgcatataccatgcaaaaatattagagagataattagaattaatttggctgtaaacacaaaggtattagtacaagatattgatgcagaaagtaataatttctcgggtagtttataatttttaaattatgttttaaaattaactatcacatacttaccgtaagtttaaagtagtttgatttcttgcctttatatatcttctggcaaggac

SEQ ID NO: 8570 - DNA, 238 bp, synthetic construct; identical to SEQ ID NO: 8569
  misc_feature 1..238: note = promoter
  source 1..238: mol_type = other DNA

SEQ ID NO: 8571 - DNA, 238 bp, synthetic construct
  misc_feature 1..238: note = promoter
  source 1..238: mol_type = other DNA
gagcctatttcccatgagtccttcatatttgcatataccatgcaaaaatattagagagataattagaattaatttggctgtaaacacaaaggtattagtacaagatattgatgcagaaagtaataatttctcgggtagtttataatttttaaattatgttttaaaattaactatcacatacttaccgtaagtttaaagtagtttgatttcttgcctttatatatcttctggcaaggac

SEQ ID NO: 8572 - DNA, 238 bp, synthetic construct; identical to SEQ ID NO: 8571
  misc_feature 1..238: note = promoter
  source 1..238: mol_type = other DNA

SEQ ID NO: 8573 - DNA, 238 bp, synthetic construct
  misc_feature 1..238: note = promoter
  source 1..238: mol_type = other DNA
gaggctatttcccatgagtccttcatatttgcatataccatgcaaaaatattagagagataattagaattaatttggctgtaaacacaaaggtattagtacaagatattgatgcagaaagtaataatttctcgggtagtttataatttttaaattatgttttaaaattaactatcacatacttaccgtaagtttaaagtagtttgatttcttgcctttatatatcttctggcaaggac

SEQ ID NO: 8574 - DNA, 238 bp, synthetic construct
  misc_feature 1..238: note = promoter
  source 1..238: mol_type = other DNA
gagggtatttcccatgagtccttcatatttgcatataccatgcaaaaatattagagagataattagaattaatttggctgtaaacacaaaggtattagtacaagatattgatgcagaaagtaataatttctcgggtagtttataatttttaaattatgttttaaaattaactatcacatacttaccgtaagtttaaagtagtttgatttcttgcctttatatatcttctggcaaggac

SEQ ID NO: 8575 - DNA, 238 bp, synthetic construct
  misc_feature 1..238: note = promoter
  source 1..238: mol_type = other DNA
gagggcatttcccatgagtccttcatatttgcatataccatgcaaaaatattagagagataattagaattaatttggctgtaaacacaaaggtattagtacaagatattgatgcagaaagtaataatttctcgggtagtttataatttttaaattatgttttaaaattaactatcacatacttaccgtaagtttaaagtagtttgatttcttgcctttatatatcttctggcaaggac

SEQ ID NO: 8576 - DNA, 238 bp, synthetic construct
  misc_feature 1..238: note = promoter
  source 1..238: mol_type = other DNA
gagggcctttcccatgagtccttcatatttgcatataccatgcaaaaatattagagagataattagaattaatttggctgtaaacacaaaggtattagtacaagatattgatgcagaaagtaataatttctcgggtagtttataatttttaaattatgttttaaaattaactatcacatacttaccgtaagtttaaagtagtttgatttcttgcctttatatatcttctggcaaggac

SEQ ID NO: 8577 - DNA, 238 bp, synthetic construct; identical to SEQ ID NO: 8576
  misc_feature 1..238: note = promoter
  source 1..238: mol_type = other DNA

SEQ ID NO: 8578 - DNA, 238 bp, synthetic construct
  misc_feature 1..238: note = promoter
  source 1..238: mol_type = other DNA
gagggcctatcccatgagtccttcatatttgcatataccatgcaaaaatattagagagataattagaattaatttggctgtaaacacaaaggtattagtacaagatattgatgcagaaagtaataatttctcgggtagtttataatttttaaattatgttttaaaattaactatcacatacttaccgtaagtttaaagtagtttgatttcttgcctttatatatcttctggcaaggac

SEQ ID NO: 8579 - DNA, 238 bp, synthetic construct; identical to SEQ ID NO: 8578
  misc_feature 1..238: note = promoter
  source 1..238: mol_type = other DNA

SEQ ID NO: 8580 - DNA, 238 bp, synthetic construct
  misc_feature 1..238: note = promoter
  source 1..238: mol_type = other DNA
gagggcctattccatgagtccttcatatttgcatataccatgcaaaaatattagagagataattagaattaatttggctgtaaacacaaaggtattagtacaagatattgatgcagaaagtaataatttctcgggtagtttataatttttaaattatgttttaaaattaactatcacatacttaccgtaagtttaaagtagtttgatttcttgcctttatatatcttctggcaaggac

SEQ ID NO: 8581 - DNA, 238 bp, synthetic construct
  misc_feature 1..238: note = promoter
  source 1..238: mol_type = other DNA
gagggcctatttcatgagtccttcatatttgcatataccatgcaaaaatattagagagataattagaattaatttggctgtaaacacaaaggtattagtacaagatattgatgcagaaagtaataatttctcgggtagtttataatttttaaattatgttttaaaattaactatcacatacttaccgtaagtttaaagtagtttgatttcttgcctttatatatcttctggcaaggac

SEQ ID NO: 8582 - DNA, 238 bp, synthetic construct; identical to SEQ ID NO: 8581
  misc_feature 1..238: note = promoter
  source 1..238: mol_type = other DNA

SEQ ID NO: 8583 - DNA, 238 bp, synthetic construct
  misc_feature 1..238: note = promoter
  source 1..238: mol_type = other DNA
gagggcctatttcctgagtccttcatatttgcatataccatgcaaaaatattagagagataattagaattaatttggctgtaaacacaaaggtattagtacaagatattgatgcagaaagtaataatttctcgggtagtttataatttttaaattatgttttaaaattaactatcacatacttaccgtaagtttaaagtagtttgatttcttgcctttatatatcttctggcaaggac

SEQ ID NO: 8584 - DNA, 238 bp, synthetic construct
  misc_feature 1..238: note = promoter
  source 1..238: mol_type = other DNA
gagggcctatttcccgagtccttcatatttgcatataccatgcaaaaatattagagagataattagaattaatttggctgtaaacacaaaggtattagtacaagatattgatgcagaaagtaataatttctcgggtagtttataatttttaaattatgttttaaaattaactatcacatacttaccgtaagtttaaagtagtttgatttcttgcctttatatatcttctggcaaggac

SEQ ID NO: 8585 - DNA, 238 bp, synthetic construct
  misc_feature 1..238: note = promoter
  source 1..238: mol_type = other DNA
gagggcctatttcccaagtccttcatatttgcatataccatgcaaaaatattagagagataattagaattaatttggctgtaaacacaaaggtattagtacaagatattgatgcagaaagtaataatttctcgggtagtttataatttttaaattatgttttaaaattaactatcacatacttaccgtaagtttaaagtagtttgatttcttgcctttatatatcttctggcaaggac

SEQ ID NO: 8586 - DNA, 238 bp, synthetic construct
  misc_feature 1..238: note = promoter
  source 1..238: mol_type = other DNA
gagggcctatttcccatgtccttcatatttgcatataccatgcaaaaatattagagagataattagaattaatttggctgtaaacacaaaggtattagtacaagatattgatgcagaaagtaataatttctcgggtagtttataatttttaaattatgttttaaaattaactatcacatacttaccgtaagtttaaagtagtttgatttcttgcctttatatatcttctggcaaggac

SEQ ID NO: 8587 - DNA, 238 bp, synthetic construct; identical to SEQ ID NO: 8586
  misc_feature 1..238: note = promoter
  source 1..238: mol_type = other DNA

SEQ ID NO: 8588 - DNA, 238 bp, synthetic construct
  misc_feature 1..238: note = promoter
  source 1..238: mol_type = other DNA
gagggcctatttcccatgaccttcatatttgcatataccatgcaaaaatattagagagataattagaattaatttggctgtaaacacaaaggtattagtacaagatattgatgcagaaagtaataatttctcgggtagtttataatttttaaattatgttttaaaattaactatcacatacttaccgtaagtttaaagtagtttgatttcttgcctttatatatcttctggcaaggac

SEQ ID NO: 8589 - DNA, 238 bp, synthetic construct
  misc_feature 1..238: note = promoter
  source 1..238: mol_type = other DNA
gagggcctatttcccatgagcttcatatttgcatataccatgcaaaaatattagagagataattagaattaatttggctgtaaacacaaaggtattagtacaagatattgatgcagaaagtaataatttctcgggtagtttataatttttaaattatgttttaaaattaactatcacatacttaccgtaagtttaaagtagtttgatttcttgcctttatatatcttctggcaaggac

SEQ ID NO: 8590 - DNA, 238 bp, synthetic construct
  misc_feature 1..238: note = promoter
  source 1..238: mol_type = other DNA
gagggcctatttcccatgagtttcatatttgcatataccatgcaaaaatattagagagataattagaattaatttggctgtaaacacaaaggtattagtacaagatattgatgcagaaagtaataatttctcgggtagtttataatttttaaattatgttttaaaattaactatcacatacttaccgtaagtttaaagtagtttgatttcttgcctttatatatcttctggcaaggac

SEQ ID NO: 8591 - DNA, 238 bp, synthetic construct
  misc_feature 1..238: note = promoter
  source 1..238: mol_type = other DNA
gagggcctatttcccatgagtctcatatttgcatataccatgcaaaaatattagagagataattagaattaatttggctgtaaacacaaaggtattagtacaagatattgatgcagaaagtaataatttctcgggtagtttataatttttaaattatgttttaaaattaactatcacatacttaccgtaagtttaaagtagtttgatttcttgcctttatatatcttctggcaaggac

SEQ ID NO: 8592 - DNA, 238 bp, synthetic construct
  misc_feature 1..238: note = promoter
  source 1..238: mol_type = other DNA
gagggcctatttcccatgagtcccatatttgcatataccatgcaaaaatattagagagataattagaattaatttggctgtaaacacaaaggtattagtacaagatattgatgcagaaagtaataatttctcgggtagtttataatttttaaattatgttttaaaattaactatcacatacttaccgtaagtttaaagtagtttgatttcttgcctttatatatcttctggcaaggac

SEQ ID NO: 8593 - DNA, 238 bp, synthetic construct
  misc_feature 1..238: note = promoter
  source 1..238: mol_type = other DNA
gagggcctatttcccatgagtcctatatttgcatataccatgcaaaaatattagagagataattagaattaatttggctgtaaacacaaaggtattagtacaagatattgatgcagaaagtaataatttctcgggtagtttataatttttaaattatgttttaaaattaactatcacatacttaccgtaagtttaaagtagtttgatttcttgcctttatatatcttctggcaaggac

SEQ ID NO: 8594 - DNA, 238 bp, synthetic construct
  misc_feature 1..238: note = promoter
  source 1..238: mol_type = other DNA
gagggcctatttcccatgagtcctttatttgcatataccatgcaaaaatattagagagataattagaattaatttggctgtaaacacaaaggtattagtacaagatattgatgcagaaagtaataatttctcgggtagtttataatttttaaattatgttttaaaattaactatcacatacttaccgtaagtttaaagtagtttgatttcttgcctttatatatcttctggcaaggac

SEQ ID NO: 8595 - DNA, 238 bp, synthetic construct
  misc_feature 1..238: note = promoter
  source 1..238: mol_type = other DNA
gagggcctatttcccatgagtccttcatttgcatataccatgcaaaaatattagagagataattagaattaatttggctgtaaacacaaaggtattagtacaagatattgatgcagaaagtaataatttctcgggtagtttataatttttaaattatgttttaaaattaactatcacatacttaccgtaagtttaaagtagtttgatttcttgcctttatatatcttctggcaaggac

SEQ ID NO: 8596 - DNA, 238 bp, synthetic construct; identical to SEQ ID NO: 8595
  misc_feature 1..238: note = promoter
  source 1..238: mol_type = other DNA

SEQ ID NO: 8597 - DNA, 238 bp, synthetic construct; identical to SEQ ID NO: 8595
  misc_feature 1..238: note = promoter
  source 1..238: mol_type = other DNA

SEQ ID NO: 8598 - DNA, 238 bp, synthetic construct
  misc_feature 1..238: note = promoter
  source 1..238: mol_type = other DNA
gagggcctatttcccatgagtccttcatatgcatataccatgcaaaaatattagagagataattagaattaatttggctgtaaacacaaaggtattagtacaagatattgatgcagaaagtaataatttctcgggtagtttataatttttaaattatgttttaaaattaactatcacatacttaccgtaagtttaaagtagtttgatttcttgcctttatatatcttctggcaaggac

SEQ ID NO: 8599 - DNA, 238 bp, synthetic construct; identical to SEQ ID NO: 8598
  misc_feature 1..238: note = promoter
  source 1..238: mol_type = other DNA

SEQ ID NO: 8600 - DNA, 238 bp, synthetic construct
  misc_feature 1..238: note = promoter
  source 1..238: mol_type = other DNA
gagggcctatttcccatgagtccttcatattcatataccatgcaaaaatattagagagataattagaattaatttggctgtaaacacaaaggtattagtacaagatattgatgcagaaagtaataatttctcgggtagtttataatttttaaattatgttttaaaattaactatcacatacttaccgtaagtttaaagtagtttgatttcttgcctttatatatcttctggcaaggac

SEQ ID NO: 8601 - DNA, 238 bp, synthetic construct
  misc_feature 1..238: note = promoter
  source 1..238: mol_type = other DNA
gagggcctatttcccatgagtccttcatatttatataccatgcaaaaatattagagagataattagaattaatttggctgtaaacacaaaggtattagtacaagatattgatgcagaaagtaataatttctcgggtagtttataatttttaaattatgttttaaaattaactatcacatacttaccgtaagtttaaagtagtttgatttcttgcctttatatatcttctggcaaggac

SEQ ID NO: 8602 - DNA, 238 bp, synthetic construct
  misc_feature 1..238: note = promoter
  source 1..238: mol_type = other DNA
gagggcctatttcccatgagtccttcatatttgtataccatgcaaaaatattagagagataattagaattaatttggctgtaaacacaaaggtattagtacaagatattgatgcagaaagtaataatttctcgggtagtttataatttttaaattatgttttaaaattaactatcacatacttaccgtaagtttaaagtagtttgatttcttgcctttatatatcttctggcaaggac

SEQ ID NO: 8603 - DNA, 238 bp, synthetic construct
  misc_feature 1..238: note = promoter
  source 1..238: mol_type = other DNA
gagggcctatttcccatgagtccttcatatttgcataccatgcaaaaatattagagagataattagaattaatttggctgtaaacacaaaggtattagtacaagatattgatgcagaaagtaataatttctcgggtagtttataatttttaaattatgttttaaaattaactatcacatacttaccgtaagtttaaagtagtttgatttcttgcctttatatatcttctggcaaggac

SEQ ID NO: 8604 - DNA, 238 bp, synthetic construct; identical to SEQ ID NO: 8603
  misc_feature 1..238: note = promoter
  source 1..238: mol_type = other DNA

SEQ ID NO: 8605 - DNA, 238 bp, synthetic construct; identical to SEQ ID NO: 8603
  misc_feature 1..238: note = promoter
  source 1..238: mol_type = other DNA

SEQ ID NO: 8606 - DNA, 238 bp, synthetic construct; identical to SEQ ID NO: 8603
  misc_feature 1..238: note = promoter
  source 1..238: mol_type = other DNA

SEQ ID NO: 8607 - DNA, 238 bp, synthetic construct
  misc_feature 1..238: note = promoter
  source 1..238: mol_type = other DNA
gagggcctatttcccatgagtccttcatatttgcatatcatgcaaaaatattagagagataattagaattaatttggctgtaaacacaaaggtattagtacaagatattgatgcagaaagtaataatttctcgggtagtttataatttttaaattatgttttaaaattaactatcacatacttaccgtaagtttaaagtagtttgatttcttgcctttatatatcttctggcaaggac

SEQ ID NO: 8608 - DNA, 238 bp, synthetic construct
  misc_feature 1..238: note = promoter
  source 1..238: mol_type = other DNA
gagggcctatttcccatgagtccttcatatttgcatataatgcaaaaatattagagagataattagaattaatttggctgtaaacacaaaggtattagtacaagatattgatgcagaaagtaataatttctcgggtagtttataatttttaaattatgttttaaaattaactatcacatacttaccgtaagtttaaagtagtttgatttcttgcctttatatatcttctggcaaggac

SEQ ID NO: 8609 - DNA, 238 bp, synthetic construct
  misc_feature 1..238: note = promoter
  source 1..238: mol_type = other DNA
gagggcctatttcccatgagtccttcatatttgcatatactgcaaaaatattagagagataattagaattaatttggctgtaaacacaaaggtattagtacaagatattgatgcagaaagtaataatttctcgggtagtttataatttttaaattatgttttaaaattaactatcacatacttaccgtaagtttaaagtagtttgatttcttgcctttatatatcttctggcaaggac

SEQ ID NO: 8610 - DNA, 238 bp, synthetic construct
  misc_feature 1..238: note = promoter
  source 1..238: mol_type = other DNA
gagggcctatttcccatgagtccttcatatttgcatataccgcaaaaatattagagagataattagaattaatttggctgtaaacacaaaggtattagtacaagatattgatgcagaaagtaataatttctcgggtagtttataatttttaaattatgttttaaaattaactatcacatacttaccgtaagtttaaagtagtttgatttcttgcctttatatatcttctggcaaggac

SEQ ID NO: 8611 - DNA, 238 bp, synthetic construct
  misc_feature 1..238: note = promoter
  source 1..238: mol_type = other DNA
gagggcctatttcccatgagtccttcatatttgcatataccacaaaaatattagagagataattagaattaatttggctgtaaacacaaaggtattagtacaagatattgatgcagaaagtaataatttctcgggtagtttataatttttaaattatgttttaaaattaactatcacatacttaccgtaagtttaaagtagtttgatttcttgcctttatatatcttctggcaaggac

SEQ ID NO: 8612 - DNA, 238 bp, synthetic construct
  misc_feature 1..238: note = promoter
  source 1..238: mol_type = other DNA
gagggcctatttcccatgagtccttcatatttgcatataccataaaaatattagagagataattagaattaatttggctgtaaacacaaaggtattagtacaagatattgatgcagaaagtaataatttctcgggtagtttataatttttaaattatgttttaaaattaactatcacatacttaccgtaagtttaaagtagtttgatttcttgcctttatatatcttctggcaaggac

SEQ ID NO: 8613 - DNA, 238 bp, synthetic construct
  misc_feature 1..238: note = promoter
  source 1..238: mol_type = other DNA
gagggcctatttcccatgagtccttcatatttgcatataccatgaaaatattagagagataattagaattaatttggctgtaaacacaaaggtattagtacaagatattgatgcagaaagtaataatttctcgggtagtttataatttttaaattatgttttaaaattaactatcacatacttaccgtaagtttaaagtagtttgatttcttgcctttatatatcttctggcaaggac

SEQ ID NO: 8614 - DNA, 238 bp, synthetic construct
  misc_feature 1..238: note = promoter
  source 1..238: mol_type = other DNA
gagggcctatttcccatgagtccttcatatttgcatataccatgcaaatattagagagataattagaattaatttggctgtaaacacaaaggtattagtacaagatattgatgcagaaagtaataatttctcgggtagtttataatttttaaattatgttttaaaattaactatcacatacttaccgtaagtttaaagtagtttgatttcttgcctttatatatcttctggcaaggac

SEQ ID NO: 8615 - DNA, 238 bp, synthetic construct; identical to SEQ ID NO: 8614
  misc_feature 1..238: note = promoter
  source 1..238: mol_type = other DNA

SEQ ID NO: 8616 - DNA, 238 bp, synthetic construct; identical to SEQ ID NO: 8614
  misc_feature 1..238: note = promoter
  source 1..238: mol_type = other DNA

SEQ ID NO: 8617 - DNA, 238 bp, synthetic construct; identical to SEQ ID NO: 8614
  misc_feature 1..238: note = promoter
  source 1..238: mol_type = other DNA

SEQ ID NO: 8618 - DNA, 238 bp, synthetic construct
  misc_feature 1..238: note = promoter
  source 1..238: mol_type = other DNA
gagggcctatttcccatgagtccttcatatttgcatataccatgcaaaaattagagagataattagaattaatttggctgtaaacacaaaggtattagtacaagatattgatgcagaaagtaataatttctcgggtagtttataatttttaaattatgttttaaaattaactatcacatacttaccgtaagtttaaagtagtttgatttcttgcctttatatatcttctggcaaggac

SEQ ID NO: 8619 - DNA, 238 bp, synthetic construct; identical to SEQ ID NO: 8618
  misc_feature 1..238: note = promoter
  source 1..238: mol_type = other DNA

SEQ ID NO: 8620 - DNA, 238 bp, synthetic construct; identical to SEQ ID NO: 8618
  misc_feature 1..238: note = promoter
  source 1..238: mol_type = other DNA

SEQ ID NO: 8621 - DNA, 238 bp, synthetic construct
  misc_feature 1..238: note = promoter
  source 1..238: mol_type = other DNA
gagggcctatttcccatgagtccttcatatttgcatataccatgcaaaaataagagagataattagaattaatttggctgtaaacacaaaggtattagtacaagatattgatgcagaaagtaataatttctcgggtagtttataatttttaaattatgttttaaaattaactatcacatacttaccgtaagtttaaagtagtttgatttcttgcctttatatatcttctggcaaggac

SEQ ID NO: 8622 - DNA, 238 bp, synthetic construct
  misc_feature 1..238: note = promoter
  source 1..238: mol_type = other DNA
gagggcctatttcccatgagtccttcatatttgcatataccatgcaaaaatatgagagataattagaattaatttggctgtaaacacaaaggtattagtacaagatattgatgcagaaagtaataatttctcgggtagtttataatttttaaattatgttttaaaattaactatcacatacttaccgtaagtttaaagtagtttgatttcttgcctttatatatcttctggcaaggac

SEQ ID NO: 8623 - DNA, 238 bp, synthetic construct
  misc_feature 1..238: note = promoter
  source 1..238: mol_type = other DNA
gagggcctatttcccatgagtccttcatatttgcatataccatgcaaaaatattagagataattagaattaatttggctgtaaacacaaaggtattagtacaagatattgatgcagaaagtaataatttctcgggtagtttataatttttaaattatgttttaaaattaactatcacatacttaccgtaagtttaaagtagtttgatttcttgcctttatatatcttctggcaaggac

SEQ ID NO: 8624 - DNA, 238 bp, synthetic construct; identical to SEQ ID NO: 8623
  misc_feature 1..238: note = promoter
  source 1..238: mol_type = other DNA

SEQ ID NO: 8625 - DNA, 238 bp, synthetic construct; identical to SEQ ID NO: 8623
  misc_feature 1..238: note = promoter
  source 1..238: mol_type = other DNA

SEQ ID NO: 8626 - DNA, 238 bp, synthetic construct; identical to SEQ ID NO: 8623
  misc_feature 1..238: note = promoter
  source 1..238: mol_type = other DNA

SEQ ID NO: 8627 - DNA, 238 bp, synthetic construct; identical to SEQ ID NO: 8623
  misc_feature 1..238: note = promoter
  source 1..238: mol_type = other DNA

SEQ ID NO: 8628 - DNA, 238 bp, synthetic construct; identical to SEQ ID NO: 8623
  misc_feature 1..238: note = promoter
  source 1..238: mol_type = other DNA

SEQ ID NO: 8629 - DNA, 238 bp, synthetic construct
  misc_feature 1..238: note = promoter
  source 1..238: mol_type = other DNA
gagggcctatttcccatgagtccttcatatttgcatataccatgcaaaaatattagagagaattagaattaatttggctgtaaacacaaaggtattagtacaagatattgatgcagaaagtaataatttctcgggtagtttataatttttaaattatgttttaaaattaactatcacatacttaccgtaagtttaaagtagtttgatttcttgcctttatatatcttctggcaaggac

SEQ ID NO: 8630 - DNA, 238 bp, synthetic construct; identical to SEQ ID NO: 8629
  misc_feature 1..238: note = promoter
  source 1..238: mol_type = other DNA

SEQ ID NO: 8631 - DNA, 238 bp, synthetic construct
  misc_feature 1..238: note = promoter
  source 1..238: mol_type = other DNA
gagggcctatttcccatgagtccttcatatttgcatataccatgcaaaaatattagagagatttagaattaatttggctgtaaacacaaaggtattagtacaagatattgatgcagaaagtaataatttctcgggtagtttataatttttaaattatgttttaaaattaactatcacatacttaccgtaagtttaaagtagtttgatttcttgcctttatatatcttctggcaaggac

SEQ ID NO: 8632 - DNA, 238 bp, synthetic construct
  misc_feature 1..238: note = promoter
  source 1..238: mol_type = other DNA
gagggcctatttcccatgagtccttcatatttgcatataccatgcaaaaatattagagagatatagaattaatttggctgtaaacacaaaggtattagtacaagatattgatgcagaaagtaataatttctcgggtagtttataatttttaaattatgttttaaaattaactatcacatacttaccgtaagtttaaagtagtttgatttcttgcctttatatatcttctggcaaggac

SEQ ID NO: 8633 - DNA, 238 bp, synthetic construct
  misc_feature 1..238: note = promoter
  source 1..238: mol_type = other DNA
gagggcctatttcccatgagtccttcatatttgcatataccatgcaaaaatattagagagataaagaattaatttggctgtaaacacaaaggtattagtacaagatattgatgcagaaagtaataatttctcgggtagtttataatttttaaattatgttttaaaattaactatcacatacttaccgtaagtttaaagtagtttgatttcttgcctttatatatcttctggcaaggac

SEQ ID NO: 8634 - DNA, 238 bp, synthetic construct
  misc_feature 1..238: note = promoter
  source 1..238: mol_type = other DNA
gagggcctatttcccatgagtccttcatatttgcatataccatgcaaaaatattagagagataatgaattaatttggctgtaaacacaaaggtattagtacaagatattgatgcagaaagtaataatttctcgggtagtttataatttttaaattatgttttaaaattaactatcacatacttaccgtaagtttaaagtagtttgatttcttgcctttatatatcttctggcaaggac

SEQ ID NO: 8635 - DNA, 238 bp, synthetic construct
  misc_feature 1..238: note = promoter
  source 1..238: mol_type = other DNA
gagggcctatttcccatgagtccttcatatttgcatataccatgcaaaaatattagagagataattaattaatttggctgtaaacacaaaggtattagtacaagatattgatgcagaaagtaataatttctcgggtagtttataatttttaaattatgttttaaaattaactatcacatacttaccgtaagtttaaagtagtttgatttcttgcctttatatatcttctggcaaggac

SEQ ID NO: 8636 - DNA, 238 bp, synthetic construct; identical to SEQ ID NO: 8635
  misc_feature 1..238: note = promoter
  source 1..238: mol_type = other DNA

SEQ ID NO: 8637 - DNA, 238 bp, synthetic construct
  misc_feature 1..238: note = promoter
  source 1..238: mol_type = other DNA
gagggcctatttcccatgagtccttcatatttgcatataccatgcaaaaatattagagagataattagttaatttggctgtaaacacaaaggtattagtacaagatattgatgcagaaagtaataatttctcgggtagtttataatttttaaattatgttttaaaattaactatcacatacttaccgtaagtttaaagtagtttgatttcttgcctttatatatcttctggcaaggac

SEQ ID NO: 8638 - DNA, 238 bp, synthetic construct
  misc_feature 1..238: note = promoter
  source 1..238: mol_type = other DNA
gagggcctatttcccatgagtccttcatatttgcatataccatgcaaaaatattagagagataattagataatttggctgtaaacacaaaggtattagtacaagatattgatgcagaaagtaataatttctcgggtagtttataatttttaaattatgttttaaaattaactatcacatacttaccgtaagtttaaagtagtttgatttcttgcctttatatatcttctggcaaggac

SEQ ID NO: 8639 - DNA, 238 bp, synthetic construct
  misc_feature 1..238: note = promoter
  source 1..238: mol_type = other DNA
gagggcctatttcccatgagtccttcatatttgcatataccatgcaaaaatattagagagataattagaaaatttggctgtaaacacaaaggtattagtacaagatattgatgcagaaagtaataatttctcgggtagtttataatttttaaattatgttttaaaattaactatcacatacttaccgtaagtttaaagtagtttgatttcttgcctttatatatcttctggcaaggac

SEQ ID NO: 8640 - DNA, 238 bp, synthetic construct
  misc_feature 1..238: note = promoter
  source 1..238: mol_type = other DNA
gagggcctatttcccatgagtccttcatatttgcatataccatgcaaaaatattagagagataattagaatatttggctgtaaacacaaaggtattagtacaagatattgatgcagaaagtaataatttctcgggtagtttataatttttaaattatgttttaaaattaactatcacatacttaccgtaagtttaaagtagtttgatttcttgcctttatatatcttctggcaaggac

SEQ ID NO: 8641 - DNA, 238 bp, synthetic construct
  misc_feature 1..238: note = promoter
  source 1..238: mol_type = other DNA
gagggcctatttcccatgagtccttcatatttgcatataccatgcaaaaatattagagagataattagaatttttggctgtaaacacaaaggtattagtacaagatattgatgcagaaagtaataatttctcgggtagtttataatttttaaattatgttttaaaattaactatcacatacttaccgtaagtttaaagtagtttgatttcttgcctttatatatcttctggcaaggac

SEQ ID NO: 8642 - DNA, 238 bp, synthetic construct
  misc_feature 1..238: note = promoter
  source 1..238: mol_type = other DNA
gagggcctatttcccatgagtccttcatatttgcatataccatgcaaaaatattagagagataattagaattattggctgtaaacacaaaggtattagtacaagatattgatgcagaaagtaataatttctcgggtagtttataatttttaaattatgttttaaaattaactatcacatacttaccgtaagtttaaagtagtttgatttcttgcctttatatatcttctggcaaggac

SEQ ID NO: 8643 - DNA, 238 bp, synthetic construct
  misc_feature 1..238: note = promoter
  source 1..238: mol_type = other DNA
gagggcctatttcccatgagtccttcatatttgcatataccatgcaaaaatattagagagataattagaattaatggctgtaaacacaaaggtattagtacaagatattgatgcagaaagtaataatttctcgggtagtttataatttttaaattatgttttaaaattaactatcacatacttaccgtaagtttaaagtagtttgatttcttgcctttatatatcttctggcaaggac

SEQ ID NO: 8644 - DNA, 238 bp, synthetic construct; identical to SEQ ID NO: 8643
  misc_feature 1..238: note = promoter
  source 1..238: mol_type = other DNA

SEQ ID NO: 8645 - DNA, 238 bp, synthetic construct
  misc_feature 1..238: note = promoter
  source 1..238: mol_type = other DNA
gagggcctatttcccatgagtccttcatatttgcatataccatgcaaaaatattagagagataattagaattaattgctgtaaacacaaaggtattagtacaagatattgatgcagaaagtaataatttctcgggtagtttataatttttaaattatgttttaaaattaactatcacatacttaccgtaagtttaaagtagtttgatttcttgcctttatatatcttctggcaaggac

SEQ ID NO: 8646 - DNA, 238 bp, synthetic construct
  misc_feature 1..238: note = promoter
  source 1..238: mol_type = other DNA
gagggcctatttcccatgagtccttcatatttgcatataccatgcaaaaatattagagagataattagaattaatttctgtaaacacaaaggtattagtacaagatattgatgcagaaagtaataatttctcgggtagtttataatttttaaattatgttttaaaattaactatcacatacttaccgtaagtttaaagtagtttgatttcttgcctttatatatcttctggcaaggac

SEQ ID NO: 8647 - DNA, 238 bp, synthetic construct
  misc_feature 1..238: note = promoter
  source 1..238: mol_type = other DNA
gagggcctatttcccatgagtccttcatatttgcatataccatgcaaaaatattagagagataattagaattaatttgtgtaaacacaaaggtattagtacaagatattgatgcagaaagtaataatttctcgggtagtttataatttttaaattatgttttaaaattaactatcacatacttaccgtaagtttaaagtagtttgatttcttgcctttatatatcttctggcaaggac

SEQ ID NO: 8648 - DNA, 238 bp, synthetic construct
  misc_feature 1..238: note = promoter
  source 1..238: mol_type = other DNA
gagggcctatttcccatgagtccttcatatttgcatataccatgcaaaaatattagagagataattagaattaatttgggtaaacacaaaggtattagtacaagatattgatgcagaaagtaataatttctcgggtagtttataatttttaaattatgttttaaaattaactatcacatacttaccgtaagtttaaagtagtttgatttcttgcctttatatatcttctggcaaggac

SEQ ID NO: 8649 - DNA, 238 bp, synthetic construct
  misc_feature 1..238: note = promoter
  source 1..238: mol_type = other DNA
gagggcctatttcccatgagtccttcatatttgcatataccatgcaaaaatattagagagataattagaattaatttggctaaacacaaaggtattagtacaagatattgatgcagaaagtaataatttctcgggtagtttataatttttaaattatgttttaaaattaactatcacatacttaccgtaagtttaaagtagtttgatttcttgcctttatatatcttctggcaaggac

SEQ ID NO: 8650 - DNA, 238 bp, synthetic construct; identical to SEQ ID NO: 8649
  misc_feature 1..238: note = promoter
  source 1..238: mol_type = other DNA

SEQ ID NO: 8651 - DNA, 238 bp, synthetic construct
  misc_feature 1..238: note = promoter
  source 1..238: mol_type = other DNA
gagggcctatttcccatgagtccttcatatttgcatataccatgcaaaaatattagagagataattagaattaatttggctgaacacaaaggtattagtacaagatattgatgcagaaagtaataatttctcgggtagtttataatttttaaattatgttttaaaattaactatcacatacttaccgtaagtttaaagtagtttgatttcttgcctttatatatcttctggcaaggac

SEQ ID NO: 8652 - DNA, 238 bp, synthetic construct
  misc_feature 1..238: note = promoter
  source 1..238: mol_type = other DNA
gagggcctatttcccatgagtccttcatatttgcatataccatgcaaaaatattagagagataattagaattaatttggctgtacacaaaggtattagtacaagatattgatgcagaaagtaataatttctcgggtagtttataatttttaaattatgttttaaaattaactatcacatacttaccgtaagtttaaagtagtttgatttcttgcctttatatatcttctggcaaggac

SEQ ID NO: 8653 - DNA, 238 bp, synthetic construct; identical to SEQ ID NO: 8652
  misc_feature 1..238: note = promoter
  source 1..238: mol_type = other DNA

SEQ ID NO: 8654 - DNA, 238 bp, synthetic construct
  misc_feature 1..238: note = promoter
  source 1..238: mol_type = other DNA
gagggcctatttcccatgagtccttcatatttgcatataccatgcaaaaatattagagagataattagaattaatttggctgtaaacaaaggtattagtacaagatattgatgcagaaagtaataatttctcgggtagtttataatttttaaattatgttttaaaattaactatcacatacttaccgtaagtttaaagtagtttgatttcttgcctttatatatcttctggcaaggac

SEQ ID NO: 8655 - DNA, 238 bp, synthetic construct; identical to SEQ ID NO: 8654
  misc_feature 1..238: note = promoter
  source 1..238: mol_type = other DNA

SEQ ID NO: 8656 - DNA, 238 bp, synthetic construct; identical to SEQ ID NO: 8654
  misc_feature 1..238: note = promoter
  source 1..238: mol_type = other DNA

SEQ ID NO: 8657 - DNA, 238 bp, synthetic construct; identical to SEQ ID NO: 8654
  misc_feature 1..238: note = promoter
  source 1..238: mol_type = other DNA

SEQ ID NO: 8658 - DNA, 238 bp, synthetic construct
  misc_feature 1..238: note = promoter
  source 1..238: mol_type = other DNA
gagggcctatttcccatgagtccttcatatttgcatataccatgcaaaaatattagagagataattagaattaatttggctgtaaacacaggtattagtacaagatattgatgcagaaagtaataatttctcgggtagtttataatttttaaattatgttttaaaattaactatcacatacttaccgtaagtttaaagtagtttgatttcttgcctttatatatcttctggcaaggac

SEQ ID NO: 8659 - DNA, 238 bp, synthetic construct; identical to SEQ ID NO: 8658
  misc_feature 1..238: note = promoter
  source 1..238: mol_type = other DNA

SEQ ID NO: 8660 - DNA, 238 bp, synthetic construct
  misc_feature 1..238: note = promoter
  source 1..238: mol_type = other DNA
gagggcctatttcccatgagtccttcatatttgcatataccatgcaaaaatattagagagataattagaattaatttggctgtaaacacaagtattagtacaagatattgatgcagaaagtaataatttctcgggtagtttataatttttaaattatgttttaaaattaactatcacatacttaccgtaagtttaaagtagtttgatttcttgcctttatatatcttctggcaaggac

SEQ ID NO: 8661 - DNA, 238 bp, synthetic construct
  misc_feature 1..238: note = promoter
  source 1..238: mol_type = other DNA
gagggcctatttcccatgagtccttcatatttgcatataccatgcaaaaatattagagagataattagaattaatttggctgtaaacacaaatattagtacaagatattgatgcagaaagtaataatttctcgggtagtttataatttttaaattatgttttaaaattaactatcacatacttaccgtaagtttaaagtagtttgatttcttgcctttatatatcttctggcaaggac

SEQ ID NO: 8662 - DNA, 238 bp, synthetic construct
  misc_feature 1..238: note = promoter
  source 1..238: mol_type = other DNA
gagggcctatttcccatgagtccttcatatttgcatataccatgcaaaaatattagagagataattagaattaatttggctgtaaacacaaagattagtacaagatattgatgcagaaagtaataatttctcgggtagtttataatttttaaattatgttttaaaattaactatcacatacttaccgtaagtttaaagtagtttgatttcttgcctttatatatcttctggcaaggac

SEQ ID NO: 8663 - DNA, 238 bp, synthetic construct
  misc_feature 1..238: note = promoter
  source 1..238: mol_type = other DNA
gagggcctatttcccatgagtccttcatatttgcatataccatgcaaaaatattagagagataattagaattaatttggctgtaaacacaaaggttagtacaagatattgatgcagaaagtaataatttctcgggtagtttataatttttaaattatgttttaaaattaactatcacatacttaccgtaagtttaaagtagtttgatttcttgcctttatatatcttctggcaaggac

SEQ ID NO: 8664 - DNA, 238 bp, synthetic construct; identical to SEQ ID NO: 8663
  misc_feature 1..238: note = promoter
  source 1..238: mol_type = other DNA

SEQ ID NO: 8665 - DNA, 238 bp, synthetic construct
  misc_feature 1..238: note = promoter
  source 1..238: mol_type = other DNA
gagggcctatttcccatgagtccttcatatttgcatataccatgcaaaaatattagagagataattagaattaatttggctgtaaacacaaaggtaagtacaagatattgatgcagaaagtaataatttctcgggtagtttataatttttaaattatgttttaaaattaactatcacatacttaccgtaagtttaaagtagtttgatttcttgcctttatatatcttctggcaaggac

SEQ ID NO: 8666 - DNA, 238 bp, synthetic construct
  misc_feature 1..238: note = promoter
  source 1..238: mol_type = other DNA
gagggcctatttcccatgagtccttcatatttgcatataccatgcaaaaatattagagagataattagaattaatttggctgtaaacacaaaggtatgtacaagatattgatgcagaaagtaataatttctcgggtagtttataatttttaaattatgttttaaaattaactatcacatacttaccgtaagtttaaagtagtttgatttcttgcctttatatatcttctggcaaggac

SEQ ID NO: 8667 - DNA, 238 bp, synthetic construct
  misc_feature 1..238: note = promoter
  source 1..238: mol_type = other DNA
gagggcctatttcccatgagtccttcatatttgcatataccatgcaaaaatattagagagataattagaattaatttggctgtaaacacaaaggtatttacaagatattgatgcagaaagtaataatttctcgggtagtttataatttttaaattatgttttaaaattaactatcacatacttaccgtaagtttaaagtagtttgatttcttgcctttatatatcttctggcaaggac

SEQ ID NO: 8668 - DNA, 238 bp, synthetic construct
  misc_feature 1..238: note = promoter
  source 1..238: mol_type = other DNA
gagggcctatttcccatgagtccttcatatttgcatataccatgcaaaaatattagagagataattagaattaatttggctgtaaacacaaaggtattaacaagatattgatgcagaaagtaataatttctcgggtagtttataatttttaaattatgttttaaaattaactatcacatacttaccgtaagtttaaagtagtttgatttcttgcctttatatatcttctggcaaggac

SEQ ID NO: 8669 - DNA, 238 bp, synthetic construct
  misc_feature 1..238: note = promoter
  source 1..238: mol_type = other DNA
gagggcctatttcccatgagtccttcatatttgcatataccatgcaaaaatattagagagataattagaattaatttggctgtaaacacaaaggtattagcaagatattgatgcagaaagtaataatttctcgggtagtttataatttttaaattatgttttaaaattaactatcacatacttaccgtaagtttaaagtagtttgatttcttgcctttatatatcttctggcaaggac

SEQ ID NO: 8670 - DNA, 238 bp, synthetic construct
  misc_feature 1..238: note = promoter
  source 1..238: mol_type = other DNA
gagggcctatttcccatgagtccttcatatttgcatataccatgcaaaaatattagagagataattagaattaatttggctgtaaacacaaaggtattagtaagatattgatgcagaaagtaataatttctcgggtagtttataatttttaaattatgttttaaaattaactatcacatacttaccgtaagtttaaagtagtttgatttcttgcctttatatatcttctggcaaggac

SEQ ID NO: 8671 - DNA, 238 bp, synthetic construct; identical to SEQ ID NO: 8670
  misc_feature 1..238: note = promoter
  source 1..238: mol_type = other DNA

SEQ ID NO: 8672 - DNA, 238 bp, synthetic construct
  misc_feature 1..238: note = promoter
  source 1..238: mol_type = other DNA
gagggcctatttcccatgagtccttcatatttgcatataccatgcaaaaatattagagagataattagaattaatttggctgtaaacacaaaggtattagtacgatattgatgcagaaagtaataatttctcgggtagtttataatttttaaattatgttttaaaattaactatcacatacttaccgtaagtttaaagtagtttgatttcttgcctttatatatcttctggcaaggac

SEQ ID NO: 8673 - DNA, 238 bp, synthetic construct
  misc_feature 1..238: note = promoter
  source 1..238: mol_type = other DNA
gagggcctatttcccatgagtccttcatatttgcatataccatgcaaaaatattagagagataattagaattaatttggctgtaaacacaaaggtattagtacaatattgatgcagaaagtaataatttctcgggtagtttataatttttaaattatgttttaaaattaactatcacatacttaccgtaagtttaaagtagtttgatttcttgcctttatatatcttctggcaaggac

SEQ ID NO: 8674 - DNA, 238 bp, synthetic construct; identical to SEQ ID NO: 8673
  misc_feature 1..238: note = promoter
  source 1..238: mol_type = other DNA

SEQ ID NO: 8675 - DNA, 238 bp, synthetic construct
  misc_feature 1..238: note = promoter
  source 1..238: mol_type = other DNA
gagggcctatttcccatgagtccttcatatttgcatataccatgcaaaaatattagagagataattagaattaatttggctgtaaacacaaaggtattagtacaagattgatgcagaaagtaataatttctcgggtagtttataatttttaaattatgttttaaaattaactatcacatacttaccgtaagtttaaagtagtttgatttcttgcctttatatatcttctggcaaggac

SEQ ID NO: 8676 - DNA, 238 bp, synthetic construct; identical to SEQ ID NO: 8675
  misc_feature 1..238: note = promoter
  source 1..238: mol_type = other DNA

SEQ ID NO: 8677 - DNA, 238 bp, synthetic construct; identical to SEQ ID NO: 8675
  misc_feature 1..238: note = promoter
  source 1..238: mol_type = other DNA

SEQ ID NO: 8678 - DNA, 238 bp, synthetic construct
  misc_feature 1..238: note = promoter
  source 1..238: mol_type = other DNA
gagggcctatttcccatgagtccttcatatttgcatataccatgcaaaaatattagagagataattagaattaatttggctgtaaacacaaaggtattagtacaagatagatgcagaaagtaataatttctcgggtagtttataatttttaaattatgttttaaaattaactatcacatacttaccgtaagtttaaagtagtttgatttcttgcctttatatatcttctggcaaggac

SEQ ID NO: 8679 - DNA, 238 bp, synthetic construct
  misc_feature 1..238: note = promoter
  source 1..238: mol_type = other DNA
gagggcctatttcccatgagtccttcatatttgcatataccatgcaaaaatattagagagataattagaattaatttggctgtaaacacaaaggtattagtacaagatatatgcagaaagtaataatttctcgggtagtttataatttttaaattatgttttaaaattaactatcacatacttaccgtaagtttaaagtagtttgatttcttgcctttatatatcttctggcaaggac

SEQ ID NO: 8680 - DNA, 238 bp, synthetic construct
  misc_feature 1..238: note = promoter
  source 1..238: mol_type = other DNA
gagggcctatttcccatgagtccttcatatttgcatataccatgcaaaaatattagagagataattagaattaatttggctgtaaacacaaaggtattagtacaagatatttgcagaaagtaataatttctcgggtagtttataatttttaaattatgttttaaaattaactatcacatacttaccgtaagtttaaagtagtttgatttcttgcctttatatatcttctggcaaggac

SEQ ID NO: 8681 - DNA, 238 bp, synthetic construct
  misc_feature 1..238: note = promoter
  source 1..238: mol_type = other DNA
gagggcctatttcccatgagtccttcatatttgcatataccatgcaaaaatattagagagataattagaattaatttggctgtaaacacaaaggtattagtacaagatattggcagaaagtaataatttctcgggtagtttataatttttaaattatgttttaaaattaactatcacatacttaccgtaagtttaaagtagtttgatttcttgcctttatatatcttctggcaaggac

SEQ ID NO: 8682 - DNA, 238 bp, synthetic construct
  misc_feature 1..238: note = promoter
  source 1..238: mol_type = other DNA
gagggcctatttcccatgagtccttcatatttgcatataccatgcaaaaatattagagagataattagaattaatttggctgtaaacacaaaggtattagtacaagatattgacagaaagtaataatttctcgggtagtttataatttttaaattatgttttaaaattaactatcacatacttaccgtaagtttaaagtagtttgatttcttgcctttatatatcttctggcaaggac

SEQ ID NO: 8683 - DNA, 238 bp, synthetic construct
  misc_feature 1..238: note = promoter
  source 1..238: mol_type = other DNA
gagggcctatttcccatgagtccttcatatttgcatataccatgcaaaaatattagagagataattagaattaatttggctgtaaacacaaaggtattagtacaagatattgatagaaagtaataatttctcgggtagtttataatttttaaattatgttttaaaattaactatcacatacttaccgtaagtttaaagtagtttgatttcttgcctttatatatcttctggcaaggac

SEQ ID NO: 8684 - DNA, 238 bp, synthetic construct
  misc_feature 1..238: note = promoter
  source 1..238: mol_type = other DNA
gagggcctatttcccatgagtccttcatatttgcatataccatgcaaaaatattagagagataattagaattaatttggctgtaaacacaaaggtattagtacaagatattgatggaaagtaataatttctcgggtagtttataatttttaaattatgttttaaaattaactatcacatacttaccgtaagtttaaagtagtttgatttcttgcctttatatatcttctggcaaggac

SEQ ID NO: 8685 - DNA, 238 bp, synthetic construct
  misc_feature 1..238: note = promoter
  source 1..238: mol_type = other DNA
gagggcctatttcccatgagtccttcatatttgcatataccatgcaaaaatattagagagataattagaattaatttggctgtaaacacaaaggtattagtacaagatattgatgcaaagtaataatttctcgggtagtttataatttttaaattatgttttaaaattaactatcacatacttaccgtaagtttaaagtagtttgatttcttgcctttatatatcttctggcaaggac

SEQ ID NO: 8686 - DNA, 238 bp, synthetic construct; identical to SEQ ID NO: 8685
  misc_feature 1..238: note = promoter
  source 1..238: mol_type = other DNA

SEQ ID NO: 8687 - DNA, 238 bp, synthetic construct
  misc_feature 1..238: note = promoter
  source 1..238: mol_type = other DNA
gagggcctatttcccatgagtccttcatatttgcatataccatgcaaaaatattagagagataattagaattaatttggctgtaaacacaaaggtattagtacaagatattgatgcagagtaataatttctcgggtagtttataatttttaaattatgttttaaaattaactatcacatacttaccgtaagtttaaagtagtttgatttcttgcctttatatatcttctggcaaggac

SEQ ID NO: 8688 - DNA, 238 bp, synthetic construct; identical to SEQ ID NO: 8687
  misc_feature 1..238: note = promoter
  source 1..238: mol_type = other DNA

SEQ ID NO: 8689 - DNA, 238 bp, synthetic construct
  misc_feature 1..238: note = promoter
  source 1..238: mol_type = other DNA
gagggcctatttcccatgagtccttcatatttgcatataccatgcaaaaatattagagagataattagaattaatttggctgtaaacacaaaggtattagtacaagatattgatgcagaataataatttctcgggtagtttataatttttaaattatgttttaaaattaactatcacatacttaccgtaagtttaaagtagtttgatttcttgcctttatatatcttctggcaaggac

SEQ ID NO: 8690 - DNA, 238 bp, synthetic construct
  misc_feature 1..238: note = promoter
  source 1..238: mol_type = other DNA
gagggcctatttcccatgagtccttcatatttgcatataccatgcaaaaatattagagagataattagaattaatttggctgtaaacacaaaggtattagtacaagatattgatgcagaaaaataatttctcgggtagtttataatttttaaattatgttttaaaattaactatcacatacttaccgtaagtttaaagtagtttgatttcttgcctttatatatcttctggcaaggac

SEQ ID NO: 8691 - DNA, 238 bp, synthetic construct
  misc_feature 1..238: note = promoter
  source 1..238: mol_type = other DNA
gagggcctatttcccatgagtccttcatatttgcatataccatgcaaaaatattagagagataattagaattaatttggctgtaaacacaaaggtattagtacaagatattgatgcagaaagataatttctcgggtagtttataatttttaaattatgttttaaaattaactatcacatacttaccgtaagtttaaagtagtttgatttcttgcctttatatatcttctggcaaggac

SEQ ID NO: 8692 - DNA, 238 bp, synthetic construct
  misc_feature 1..238: note = promoter
  source 1..238: mol_type = other DNA
gagggcctatttcccatgagtccttcatatttgcatataccatgcaaaaatattagagagataattagaattaatttggctgtaaacacaaaggtattagtacaagatattgatgcagaaagttaatttctcgggtagtttataatttttaaattatgttttaaaattaactatcacatacttaccgtaagtttaaagtagtttgatttcttgcctttatatatcttctggcaaggac

SEQ ID NO: 8693 - DNA, 238 bp, synthetic construct
  misc_feature 1..238: note = promoter
  source 1..238: mol_type = other DNA
gagggcctatttcccatgagtccttcatatttgcatataccatgcaaaaatattagagagataattagaattaatttggctgtaaacacaaaggtattagtacaagatattgatgcagaaagtaaatttctcgggtagtttataatttttaaattatgttttaaaattaactatcacatacttaccgtaagtttaaagtagtttgatttcttgcctttatatatcttctggcaaggac

SEQ ID NO: 8694 - DNA, 238 bp, synthetic construct; identical to SEQ ID NO: 8693
  misc_feature 1..238: note = promoter
  source 1..238: mol_type = other DNA

SEQ ID NO: 8695 - DNA, 238 bp, synthetic construct
  misc_feature 1..238: note = promoter
  source 1..238: mol_type = other DNA
gagggcctatttcccatgagtccttcatatttgcatataccatgcaaaaatattagagagataattagaattaatttggctgtaaacacaaaggtattagtacaagatattgatgcagaaagtaattttctcgggtagtttataatttttaaattatgttttaaaattaactatcacatacttaccgtaagtttaaagtagtttgatttcttgcctttatatatcttctggcaaggac

SEQ ID NO: 8696 - DNA, 238 bp, synthetic construct
  misc_feature 1..238: note = promoter
  source 1..238: mol_type = other DNA
gagggcctatttcccatgagtccttcatatttgcatataccatgcaaaaatattagagagataattagaattaatttggctgtaaacacaaaggtattagtacaagatattgatgcagaaagtaatattctcgggtagtttataatttttaaattatgttttaaaattaactatcacatacttaccgtaagtttaaagtagtttgatttcttgcctttatatatcttctggcaaggac

SEQ ID NO: 8697 - DNA, 238 bp, synthetic construct
  misc_feature 1..238: note = promoter
  source 1..238: mol_type = other DNA
gagggcctatttcccatgagtccttcatatttgcatataccatgcaaaaatattagagagataattagaattaatttggctgtaaacacaaaggtattagtacaagatattgatgcagaaagtaataatctcgggtagtttataatttttaaattatgttttaaaattaactatcacatacttaccgtaagtttaaagtagtttgatttcttgcctttatatatcttctggcaaggac

SEQ ID NO: 8698 - DNA, 238 bp, synthetic construct; identical to SEQ ID NO: 8697
  misc_feature 1..238: note = promoter
  source 1..238: mol_type = other DNA

SEQ ID NO: 8699 - DNA, 238 bp, synthetic construct
  misc_feature 1..238: note = promoter
  source 1..238: mol_type = other DNA
gagggcctatttcccatgagtccttcatatttgcatataccatgcaaaaatattagagagataattagaattaatttggctgtaaacacaaaggtattagtacaagatattgatgcagaaagtaataatttcgggtagtttataatttttaaattatgttttaaaattaactatcacatacttaccgtaagtttaaagtagtttgatttcttgcctttatatatcttctggcaaggac

SEQ ID NO: 8700 - DNA, 238 bp, synthetic construct; identical to SEQ ID NO: 8699
  misc_feature 1..238: note = promoter
  source 1..238: mol_type = other DNA

SEQ ID NO: 8701 - DNA, 238 bp, synthetic construct; identical to SEQ ID NO: 8699
  misc_feature 1..238: note = promoter
  source 1..238: mol_type = other DNA

SEQ ID NO: 8702 - DNA, 238 bp, synthetic construct
  misc_feature 1..238: note = promoter
  source 1..238: mol_type = other DNA
gagggcctatttcccatgagtccttcatatttgcatataccatgcaaaaatattagagagataattagaattaatttggctgtaaacacaaaggtattagtacaagatattgatgcagaaagtaataatttctggtagtttataatttttaaattatgttttaaaattaactatcacatacttaccgtaagtttaaagtagtttgatttcttgcctttatatatcttctggcaaggac

SEQ ID NO: 8703 - DNA, 238 bp, synthetic construct
  misc_feature 1..238: note = promoter
  source 1..238: mol_type = other DNA
gagggcctatttcccatgagtccttcatatttgcatataccatgcaaaaatattagagagataattagaattaatttggctgtaaacacaaaggtattagtacaagatattgatgcagaaagtaataatttctcgtagtttataatttttaaattatgttttaaaattaactatcacatacttaccgtaagtttaaagtagtttgatttcttgcctttatatatcttctggcaaggac

SEQ ID NO: 8704 - DNA, 238 bp, synthetic construct; identical to SEQ ID NO: 8703
  misc_feature 1..238: note = promoter
  source 1..238: mol_type = other DNA

SEQ ID NO: 8705 - DNA, 238 bp, synthetic construct
  misc_feature 1..238: note = promoter
  source 1..238: mol_type = other DNA
gagggcctatttcccatgagtccttcatatttgcatataccatgcaaaaatattagagagataattagaattaatttggctgtaaacacaaaggtattagtacaagatattgatgcagaaagtaataatttctcggagtttataatttttaaattatgttttaaaattaactatcacatacttaccgtaagtttaaagtagtttgatttcttgcctttatatatcttctggcaaggac

SEQ ID NO: 8706 - DNA, 238 bp, synthetic construct
  misc_feature 1..238: note = promoter
  source 1..238: mol_type = other DNA
gagggcctatttcccatgagtccttcatatttgcatataccatgcaaaaatattagagagataattagaattaatttggctgtaaacacaaaggtattagtacaagatattgatgcagaaagtaataatttctcggggtttataatttttaaattatgttttaaaattaactatcacatacttaccgtaagtttaaagtagtttgatttcttgcctttatatatcttctggcaaggac

SEQ ID NO: 8707 - DNA, 238 bp, synthetic construct
  misc_feature 1..238: note = promoter
  source 1..238: mol_type = other DNA
gagggcctatttcccatgagtccttcatatttgcatataccatgcaaaaatattagagagataattagaattaatttggctgtaaacacaaaggtattagtacaagatattgatgcagaaagtaataatttctcgggttttataatttttaaattatgttttaaaattaactatcacatacttaccgtaagtttaaagtagtttgatttcttgcctttatatatcttctggcaaggac

SEQ ID NO: 8708 - DNA, 238 bp, synthetic construct
  misc_feature 1..238: note = promoter
  source 1..238: mol_type = other DNA
gagggcctatttcccatgagtccttcatatttgcatataccatgcaaaaatattagagagataattagaattaatttggctgtaaacacaaaggtattagtacaagatattgatgcagaaagtaataatttctcgggtattataatttttaaattatgttttaaaattaactatcacatacttaccgtaagtttaaagtagtttgatttcttgcctttatatatcttctggcaaggac

SEQ ID NO: 8709 - DNA, 238 bp, synthetic construct
  misc_feature 1..238: note = promoter
  source 1..238: mol_type = other DNA
gagggcctatttcccatgagtccttcatatttgcatataccatgcaaaaatattagagagataattagaattaatttggctgtaaacacaaaggtattagtacaagatattgatgcagaaagtaataatttctcgggtagtataatttttaaattatgttttaaaattaactatcacatacttaccgtaagtttaaagtagtttgatttcttgcctttatatatcttctggcaaggac

SEQ ID NO: 8710 - DNA, 238 bp, synthetic construct; identical to SEQ ID NO: 8709
  misc_feature 1..238: note = promoter
  source 1..238: mol_type = other DNA

SEQ ID NO: 8711 - DNA, 238 bp, synthetic construct
  misc_feature 1..238: note = promoter
  source 1..238: mol_type = other DNA
gagggcctatttcccatgagtccttcatatttgcatataccatgcaaaaatattagagagataattagaattaatttggctgtaaacacaaaggtattagtacaagatattgatgcagaaagtaataatttctcgggtagtttaatttttaaattatgttttaaaattaactatcacatacttaccgtaagtttaaagtagtttgatttcttgcctttatatatcttctggcaaggac

SEQ ID NO: 8712 - DNA, 238 bp, synthetic construct; identical to SEQ ID NO: 8711
  misc_feature 1..238: note = promoter
  source 1..238: mol_type = other DNA

SEQ ID NO: 8713 - DNA, 238 bp, synthetic construct; identical to SEQ ID NO: 8711
  misc_feature 1..238: note = promoter
  source 1..238: mol_type = other DNA

SEQ ID NO: 8714 - DNA, 238 bp, synthetic construct
  misc_feature 1..238: note = promoter
  source 1..238: mol_type = other DNA
gagggcctatttcccatgagtccttcatatttgcatataccatgcaaaaatattagagagataattagaattaatttggctgtaaacacaaaggtattagtacaagatattgatgcagaaagtaataatttctcgggtagtttattttttaaattatgttttaaaattaactatcacatacttaccgtaagtttaaagtagtttgatttcttgcctttatatatcttctggcaaggac

SEQ ID NO: 8715 - DNA, 238 bp, synthetic construct
  misc_feature 1..238: note = promoter
  source 1..238: mol_type = other DNA
gagggcctatttcccatgagtccttcatatttgcatataccatgcaaaaatattagagagataattagaattaatttggctgtaaacacaaaggtattagtacaagatattgatgcagaaagtaataatttctcgggtagtttatattttaaattatgttttaaaattaactatcacatacttaccgtaagtttaaagtagtttgatttcttgcctttatatatcttctggcaaggac

SEQ ID NO: 8716 - DNA, 238 bp, synthetic construct
  misc_feature 1..238: note = promoter
  source 1..238: mol_type = other DNA
gagggcctatttcccatgagtccttcatatttgcatataccatgcaaaaatattagagagataattagaattaatttggctgtaaacacaaaggtattagtacaagatattgatgcagaaagtaataatttctcgggtagtttataatttaaattatgttttaaaattaactatcacatacttaccgtaagtttaaagtagtttgatttcttgcctttatatatcttctggcaaggac

SEQ ID NO: 8717 - DNA, 238 bp, synthetic construct; identical to SEQ ID NO: 8716
  misc_feature 1..238: note = promoter
  source 1..238: mol_type = other DNA

SEQ ID NO: 8718 - DNA, 238 bp, synthetic construct; identical to SEQ ID NO: 8716
  misc_feature 1..238: note = promoter
  source 1..238: mol_type = other DNA

SEQ ID NO: 8719 - DNA, 238 bp, synthetic construct; identical to SEQ ID NO: 8716
  misc_feature 1..238: note = promoter
  source 1..238: mol_type = other DNA

SEQ ID NO: 8720 - DNA, 238 bp, synthetic construct
  misc_feature 1..238: note = promoter
  source 1..238: mol_type = other DNA
gagggcctatttcccatgagtccttcatatttgcatataccatgcaaaaatattagagagataattagaattaatttggctgtaaacacaaaggtattagtacaagatattgatgcagaaagtaataatttctcgggtagtttataattttaattatgttttaaaattaactatcacatacttaccgtaagtttaaagtagtttgatttcttgcctttatatatcttctggcaaggac

SEQ ID NO: 8721 - DNA, 238 bp, synthetic construct
  misc_feature 1..238: note = promoter
  source 1..238: mol_type = other DNA
gagggcctatttcccatgagtccttcatatttgcatataccatgcaaaaatattagagagataattagaattaatttggctgtaaacacaaaggtattagtacaagatattgatgcagaaagtaataatttctcgggtagtttataatttttattatgttttaaaattaactatcacatacttaccgtaagtttaaagtagtttgatttcttgcctttatatatcttctggcaaggac

SEQ ID NO: 8722 - DNA, 238 bp, synthetic construct; identical to SEQ ID NO: 8721
  misc_feature 1..238: note = promoter
  source 1..238: mol_type = other DNA

SEQ ID NO: 8723 - DNA, 238 bp, synthetic construct
  misc_feature 1..238: note = promoter
  source 1..238: mol_type = other DNA
gagggcctatttcccatgagtccttcatatttgcatataccatgcaaaaatattagagagataattagaattaatttggctgtaaacacaaaggtattagtacaagatattgatgcagaaagtaataatttctcgggtagtttataatttttaatatgttttaaaattaactatcacatacttaccgtaagtttaaagtagtttgatttcttgcctttatatatcttctggcaaggac

SEQ ID NO: 8724 - DNA, 238 bp, synthetic construct
  misc_feature 1..238: note = promoter
  source 1..238: mol_type = other DNA
gagggcctatttcccatgagtccttcatatttgcatataccatgcaaaaatattagagagataattagaattaatttggctgtaaacacaaaggtattagtacaagatattgatgcagaaagtaataatttctcgggtagtttataatttttaaaatgttttaaaattaactatcacatacttaccgtaagtttaaagtagtttgatttcttgcctttatatatcttctggcaaggac

SEQ ID NO: 8725 - DNA, 238 bp, synthetic construct
  misc_feature 1..238: note = promoter
  source 1..238: mol_type = other DNA
gagggcctatttcccatgagtccttcatatttgcatataccatgcaaaaatattagagagataattagaattaatttggctgtaaacacaaaggtattagtacaagatattgatgcagaaagtaataatttctcgggtagtttataatttttaaattgttttaaaattaactatcacatacttaccgtaagtttaaagtagtttgatttcttgcctttatatatcttctggcaaggac

SEQ ID NO: 8726 - DNA, 238 bp, synthetic construct; identical to SEQ ID NO: 8725
  misc_feature 1..238: note = promoter
  source 1..238: mol_type = other DNA

SEQ ID NO: 8727 - DNA, 238 bp, synthetic construct
  misc_feature 1..238: note = promoter
  source 1..238: mol_type = other DNA
gagggcctatttcccatgagtccttcatatttgcatataccatgcaaaaatattagagagataattagaattaatttggctgtaaacacaaaggtattagtacaagatattgatgcagaaagtaataatttctcgggtagtttataatttttaaattattttaaaattaactatcacatacttaccgtaagtttaaagtagtttgatttcttgcctttatatatcttctggcaaggac

SEQ ID NO: 8728 - DNA, 238 bp, synthetic construct; identical to SEQ ID NO: 8727
  misc_feature 1..238: note = promoter
  source 1..238: mol_type = other DNA

SEQ ID NO: 8729 - DNA, 238 bp, synthetic construct
  misc_feature 1..238: note = promoter
  source 1..238: mol_type = other DNA
gagggcctatttcccatgagtccttcatatttgcatataccatgcaaaaatattagagagataattagaattaatttggctgtaaacacaaaggtattagtacaagatattgatgcagaaagtaataatttctcgggtagtttataatttttaaattatgttaaaattaactatcacatacttaccgtaagtttaaagtagtttgatttcttgcctttatatatcttctggcaaggac

SEQ ID NO: 8730 - DNA, 238 bp, synthetic construct; identical to SEQ ID NO: 8729
  misc_feature 1..238: note = promoter
  source 1..238: mol_type = other DNA

SEQ ID NO: 8731 - DNA, 238 bp, synthetic construct; identical to SEQ ID NO: 8729
  misc_feature 1..238: note = promoter
  source 1..238: mol_type = other DNA

SEQ ID NO: 8732 - DNA, 238 bp, synthetic construct
  misc_feature 1..238: note = promoter
  source 1..238: mol_type = other DNA
gagggcctatttcccatgagtccttcatatttgcatataccatgcaaaaatattagagagataattagaattaatttggctgtaaacacaaaggtattagtacaagatattgatgcagaaagtaataatttctcgggtagtttataatttttaaattatgtttaaattaactatcacatacttaccgtaagtttaaagtagtttgatttcttgcctttatatatcttctggcaaggac

SEQ ID NO: 8733 - DNA, 238 bp, synthetic construct
  misc_feature 1..238: note = promoter
  source 1..238: mol_type = other DNA
gagggcctatttcccatgagtccttcatatttgcatataccatgcaaaaatattagagagataattagaattaatttggctgtaaacacaaaggtattagtacaagatattgatgcagaaagtaataatttctcgggtagtttataatttttaaattatgttttaattaactatcacatacttaccgtaagtttaaagtagtttgatttcttgcctttatatatcttctggcaaggac

SEQ ID NO: 8734 - DNA, 238 bp, synthetic construct; identical to SEQ ID NO: 8733
  misc_feature 1..238: note = promoter
  source 1..238: mol_type = other DNA

SEQ ID NO: 8735 - DNA, 238 bp, synthetic construct; identical to SEQ ID NO: 8733
  misc_feature 1..238: note = promoter
  source 1..238: mol_type = other DNA

SEQ ID NO: 8736 - DNA, 238 bp, synthetic construct
  misc_feature 1..238: note = promoter
  source 1..238: mol_type = other DNA
gagggcctatttcccatgagtccttcatatttgcatataccatgcaaaaatattagagagataattagaattaatttggctgtaaacacaaaggtattagtacaagatattgatgcagaaagtaataatttctcgggtagtttataatttttaaattatgttttaaataactatcacatacttaccgtaagtttaaagtagtttgatttcttgcctttatatatcttctggcaaggac

SEQ ID NO: 8737 - DNA, 238 bp, synthetic construct
  misc_feature 1..238: note = promoter
  source 1..238: mol_type = other DNA
gagggcctatttcccatgagtccttcatatttgcatataccatgcaaaaatattagagagataattagaattaatttggctgtaaacacaaaggtattagtacaagatattgatgcagaaagtaataatttctcgggtagtttataatttttaaattatgttttaaaaaactatcacatacttaccgtaagtttaaagtagtttgatttcttgcctttatatatcttctggcaaggac

SEQ ID NO: 8738 - DNA, 238 bp, synthetic construct
  misc_feature 1..238: note = promoter
  source 1..238: mol_type = other DNA
gagggcctatttcccatgagtccttcatatttgcatataccatgcaaaaatattagagagataattagaattaatttggctgtaaacacaaaggtattagtacaagatattgatgcagaaagtaataatttctcgggtagtttataatttttaaattatgttttaaaatactatcacatacttaccgtaagtttaaagtagtttgatttcttgcctttatatatcttctggcaaggac

SEQ ID NO: 8739 - DNA, 238 bp, synthetic construct
  misc_feature 1..238: note = promoter
  source 1..238: mol_type = other DNA
gagggcctatttcccatgagtccttcatatttgcatataccatgcaaaaatattagagagataattagaattaatttggctgtaaacacaaaggtattagtacaagatattgatgcagaaagtaataatttctcgggtagtttataatttttaaattatgttttaaaattctatcacatacttaccgtaagtttaaagtagtttgatttcttgcctttatatatcttctggcaaggac

SEQ ID NO: 8740 - DNA, 238 bp, synthetic construct
  misc_feature 1..238: note = promoter
  source 1..238: mol_type = other DNA
gagggcctatttcccatgagtccttcatatttgcatataccatgcaaaaatattagagagataattagaattaatttggctgtaaacacaaaggtattagtacaagatattgatgcagaaagtaataatttctcgggtagtttataatttttaaattatgttttaaaattatatcacatacttaccgtaagtttaaagtagtttgatttcttgcctttatatatcttctggcaaggac

SEQ ID NO: 8741 - DNA, 238 bp, synthetic construct
  misc_feature 1..238: note = promoter
  source 1..238: mol_type = other DNA
gagggcctatttcccatgagtccttcatatttgcatataccatgcaaaaatattagagagataattagaattaatttggctgtaaacacaaaggtattagtacaagatattgatgcagaaagtaataatttctcgggtagtttataatttttaaattatgttttaaaattaaatcacatacttaccgtaagtttaaagtagtttgatttcttgcctttatatatcttctggcaaggac

SEQ ID NO: 8742 - DNA, 238 bp, synthetic construct
  misc_feature 1..238: note = promoter
  source 1..238: mol_type = other DNA
gagggcctatttcccatgagtccttcatatttgcatataccatgcaaaaatattagagagataattagaattaatttggctgtaaacacaaaggtattagtacaagatattgatgcagaaagtaataatttctcgggtagtttataatttttaaattatgttttaaaattaactcacatacttaccgtaagtttaaagtagtttgatttcttgcctttatatatcttctggcaaggac

SEQ ID NO: 8743 - DNA, 238 bp, synthetic construct; identical to SEQ ID NO: 8742
  misc_feature 1..238: note = promoter
  source 1..238: mol_type = other DNA

SEQ ID NO: 8744 - DNA, 238 bp, synthetic construct
  misc_feature 1..238: note = promoter
  source 1..238: mol_type = other DNA
gagggcctatttcccatgagtccttcatatttgcatataccatgcaaaaatattagagagataattagaattaatttggctgtaaacacaaaggtattagtacaagatattgatgcagaaagtaataatttctcgggtagtttataatttttaaattatgttttaaaattaactaacatacttaccgtaagtttaaagtagtttgatttcttgcctttatatatcttctggcaaggac

SEQ ID NO: 8745 - DNA, 238 bp, synthetic construct
  misc_feature 1..238: note = promoter
  source 1..238: mol_type = other DNA
gagggcctatttcccatgagtccttcatatttgcatataccatgcaaaaatattagagagataattagaattaatttggctgtaaacacaaaggtattagtacaagatattgatgcagaaagtaataatttctcgggtagtttataatttttaaattatgttttaaaattaactatcatacttaccgtaagtttaaagtagtttgatttcttgcctttatatatcttctggcaaggac

SEQ ID NO: 8746 - DNA, 238 bp, synthetic construct; identical to SEQ ID NO: 8745
  misc_feature 1..238: note = promoter
  source 1..238: mol_type = other DNA

SEQ ID NO: 8747 - DNA, 238 bp, synthetic construct; identical to SEQ ID NO: 8745
  misc_feature 1..238: note = promoter
  source 1..238: mol_type = other DNA

SEQ ID NO: 8748 - DNA, 238 bp, synthetic construct
  misc_feature 1..238: note = promoter
  source 1..238: mol_type = other DNA
gagggcctatttcccatgagtccttcatatttgcatataccatgcaaaaatattagagagataattagaattaatttggctgtaaacacaaaggtattagtacaagatattgatgcagaaagtaataatttctcgggtagtttataatttttaaattatgttttaaaattaactatcacacttaccgtaagtttaaagtagtttgatttcttgcctttatatatcttctggcaaggac

SEQ ID NO: 8749 - DNA, 238 bp, synthetic construct; identical to SEQ ID NO: 8748
  misc_feature 1..238: note = promoter
  source 1..238: mol_type = other DNA

SEQ ID NO: 8750 - DNA, 238 bp, synthetic construct
  misc_feature 1..238: note = promoter
  source 1..238: mol_type = other DNA
gagggcctatttcccatgagtccttcatatttgcatataccatgcaaaaatattagagagataattagaattaatttggctgtaaacacaaaggtattagtacaagatattgatgcagaaagtaataatttctcgggtagtttataatttttaaattatgttttaaaattaactatcacatttaccgtaagtttaaagtagtttgatttcttgcctttatatatcttctggcaaggac

SEQ ID NO: 8751 - DNA, 238 bp, synthetic construct
  misc_feature 1..238: note = promoter
  source 1..238: mol_type = other DNA
gagggcctatttcccatgagtccttcatatttgcatataccatgcaaaaatattagagagataattagaattaatttggctgtaaacacaaaggtattagtacaagatattgatgcagaaagtaataatttctcgggtagtttataatttttaaattatgttttaaaattaactatcacatataccgtaagtttaaagtagtttgatttcttgcctttatatatcttctggcaaggac

SEQ ID NO: 8752 - DNA, 238 bp, synthetic construct
  misc_feature 1..238: note = promoter
  source 1..238: mol_type = other DNA
gagggcctatttcccatgagtccttcatatttgcatataccatgcaaaaatattagagagataattagaattaatttggctgtaaacacaaaggtattagtacaagatattgatgcagaaagtaataatttctcgggtagtttataatttttaaattatgttttaaaattaactatcacatacaccgtaagtttaaagtagtttgatttcttgcctttatatatcttctggcaaggac

SEQ ID NO: 8753 - DNA, 238 bp, synthetic construct
  misc_feature 1..238: note = promoter
  source 1..238: mol_type = other DNA
gagggcctatttcccatgagtccttcatatttgcatataccatgcaaaaatattagagagataattagaattaatttggctgtaaacacaaaggtattagtacaagatattgatgcagaaagtaataatttctcgggtagtttataatttttaaattatgttttaaaattaactatcacatactccgtaagtttaaagtagtttgatttcttgcctttatatatcttctggcaaggac

SEQ ID NO: 8754 - DNA, 238 bp, synthetic construct
  misc_feature 1..238: note = promoter
  source 1..238: mol_type = other DNA
gagggcctatttcccatgagtccttcatatttgcatataccatgcaaaaatattagagagataattagaattaatttggctgtaaacacaaaggtattagtacaagatattgatgcagaaagtaataatttctcgggtagtttataatttttaaattatgttttaaaattaactatcacatacttcgtaagtttaaagtagtttgatttcttgcctttatatatcttctggcaaggac

SEQ ID NO: 8755 - DNA, 238 bp, synthetic construct
  misc_feature 1..238: note = promoter
  source 1..238: mol_type = other DNA
gagggcctatttcccatgagtccttcatatttgcatataccatgcaaaaatattagagagataattagaattaatttggctgtaaacacaaaggtattagtacaagatattgatgcagaaagtaataatttctcgggtagtttataatttttaaattatgttttaaaattaactatcacatacttagtaagtttaaagtagtttgatttcttgcctttatatatcttctggcaaggac

SEQ ID NO: 8756 - DNA, 238 bp, synthetic construct
  misc_feature 1..238: note = promoter
  source 1..238: mol_type = other DNA
gagggcctatttcccatgagtccttcatatttgcatataccatgcaaaaatattagagagataattagaattaatttggctgtaaacacaaaggtattagtacaagatattgatgcagaaagtaataatttctcgggtagtttataatttttaaattatgttttaaaattaactatcacatacttactaagtttaaagtagtttgatttcttgcctttatatatcttctggcaaggac

SEQ ID NO: 8757 - DNA, 238 bp, synthetic construct
  misc_feature 1..238: note = promoter
  source 1..238: mol_type = other DNA
gagggcctatttcccatgagtccttcatatttgcatataccatgcaaaaatattagagagataattagaattaatttggctgtaaacacaaaggtattagtacaagatattgatgcagaaagtaataatttctcgggtagtttataatttttaaattatgttttaaaattaactatcacatacttaccaagtttaaagtagtttgatttcttgcctttatatatcttctggcaaggac

SEQ ID NO: 8758 - DNA, 238 bp, synthetic construct
  misc_feature 1..238: note = promoter
  source 1..238: mol_type = other DNA
gagggcctatttcccatgagtccttcatatttgcatataccatgcaaaaatattagagagataattagaattaatttggctgtaaacacaaaggtattagtacaagatattgatgcagaaagtaataatttctcgggtagtttataatttttaaattatgttttaaaattaactatcacatacttaccgagtttaaagtagtttgatttcttgcctttatatatcttctggcaaggac

SEQ ID NO: 8759 - DNA, 238 bp, synthetic construct
  misc_feature 1..238: note = promoter
  source 1..238: mol_type = other DNA
gagggcctatttcccatgagtccttcatatttgcatataccatgcaaaaatattagagagataattagaattaatttggctgtaaacacaaaggtattagtacaagatattgatgcagaaagtaataatttctcgggtagtttataatttttaaattatgttttaaaattaactatcacatacttaccgtgtttaaagtagtttgatttcttgcctttatatatcttctggcaaggac

SEQ ID NO: 8760 - DNA, 238 bp, synthetic construct
  misc_feature 1..238: note = promoter
  source 1..238: mol_type = other DNA
gagggcctatttcccatgagtccttcatatttgcatataccatgcaaaaatattagagagataattagaattaatttggctgtaaacacaaaggtattagtacaagatattgatgcagaaagtaataatttctcgggtagtttataatttttaaattatgttttaaaattaactatcacatacttaccgtatttaaagtagtttgatttcttgcctttatatatcttctggcaaggac

SEQ ID NO: 8761 - DNA, 238 bp, synthetic construct
  misc_feature 1..238: note = promoter
  source 1..238: mol_type = other DNA
gagggcctatttcccatgagtccttcatatttgcatataccatgcaaaaatattagagagataattagaattaatttggctgtaaacacaaaggtattagtacaagatattgatgcagaaagtaataatttctcgggtagtttataatttttaaattatgttttaaaattaactatcacatacttaccgtaattaaagtagtttgatttcttgcctttatatatcttctggcaaggac

SEQ ID NO: 8762 - DNA, 238 bp, synthetic construct
  misc_feature 1..238: note = promoter
  source 1..238: mol_type = other DNA
gagggcctatttcccatgagtccttcatatttgcatataccatgcaaaaatattagagagataattagaattaatttggctgtaaacacaaaggtattagtacaagatattgatgcagaaagtaataatttctcgggtagtttataatttttaaattatgttttaaaattaactatcacatacttaccgtaagtaaagtagtttgatttcttgcctttatatatcttctggcaaggac

SEQ ID NO: 8763 - DNA, 238 bp, synthetic construct; identical to SEQ ID NO: 8762
  misc_feature 1..238: note = promoter
  source 1..238: mol_type = other DNA

SEQ ID NO: 8764 - DNA, 238 bp, synthetic construct
  misc_feature 1..238: note = promoter
  source 1..238: mol_type = other DNA
gagggcctatttcccatgagtccttcatatttgcatataccatgcaaaaatattagagagataattagaattaatttggctgtaaacacaaaggtattagtacaagatattgatgcagaaagtaataatttctcgggtagtttataatttttaaattatgttttaaaattaactatcacatacttaccgtaagttaagtagtttgatttcttgcctttatatatcttctggcaaggac

SEQ ID NO: 8765 - DNA, 238 bp, synthetic construct
  misc_feature 1..238: note = promoter
  source 1..238: mol_type = other DNA
gagggcctatttcccatgagtccttcatatttgcatataccatgcaaaaatattagagagataattagaattaatttggctgtaaacacaaaggtattagtacaagatattgatgcagaaagtaataatttctcgggtagtttataatttttaaattatgttttaaaattaactatcacatacttaccgtaagtttagtagtttgatttcttgcctttatatatcttctggcaaggac

SEQ ID NO: 8766 - DNA, 238 bp, synthetic construct; identical to SEQ ID NO: 8765
  misc_feature 1..238: note = promoter
  source 1..238: mol_type = other DNA

SEQ ID NO: 8767 - DNA, 238 bp, synthetic construct
  misc_feature 1..238: note = promoter
  source 1..238: mol_type = other DNA
gagggcctatttcccatgagtccttcatatttgcatataccatgcaaaaatattagagagataattagaattaatttggctgtaaacacaaaggtattagtacaagatattgatgcagaaagtaataatttctcgggtagtttataatttttaaattatgttttaaaattaactatcacatacttaccgtaagtttaatagtttgatttcttgcctttatatatcttctggcaaggac

SEQ ID NO: 8768 - DNA, 238 bp, synthetic construct
  misc_feature 1..238: note = promoter
  source 1..238: mol_type = other DNA
gagggcctatttcccatgagtccttcatatttgcatataccatgcaaaaatattagagagataattagaattaatttggctgtaaacacaaaggtattagtacaagatattgatgcagaaagtaataatttctcgggtagtttataatttttaaattatgttttaaaattaactatcacatacttaccgtaagtttaaaagtttgatttcttgcctttatatatcttctggcaaggac

SEQ ID NO: 8769 - DNA, 238 bp, synthetic construct
  misc_feature 1..238: note = promoter
  source 1..238: mol_type = other DNA
gagggcctatttcccatgagtccttcatatttgcatataccatgcaaaaatattagagagataattagaattaatttggctgtaaacacaaaggtattagtacaagatattgatgcagaaagtaataatttctcgggtagtttataatttttaaattatgttttaaaattaactatcacatacttaccgtaagtttaaaggtttgatttcttgcctttatatatcttctggcaaggac

SEQ ID NO: 8770 - DNA, 238 bp, synthetic construct
  misc_feature 1..238: note = promoter
  source 1..238: mol_type = other DNA
gagggcctatttcccatgagtccttcatatttgcatataccatgcaaaaatattagagagataattagaattaatttggctgtaaacacaaaggtattagtacaagatattgatgcagaaagtaataatttctcgggtagtttataatttttaaattatgttttaaaattaactatcacatacttaccgtaagtttaaagttttgatttcttgcctttatatatcttctggcaaggac

SEQ ID NO: 8771 - DNA, 238 bp, synthetic construct
  misc_feature 1..238: note = promoter
  source 1..238: mol_type = other DNA
gagggcctatttcccatgagtccttcatatttgcatataccatgcaaaaatattagagagataattagaattaatttggctgtaaacacaaaggtattagtacaagatattgatgcagaaagtaataatttctcgggtagtttataatttttaaattatgttttaaaattaactatcacatacttaccgtaagtttaaagtattgatttcttgcctttatatatcttctggcaaggac

SEQ ID NO: 8772 - DNA, 238 bp, synthetic construct
  misc_feature 1..238: note = promoter
  source 1..238: mol_type = other DNA
gagggcctatttcccatgagtccttcatatttgcatataccatgcaaaaatattagagagataattagaattaatttggctgtaaacacaaaggtattagtacaagatattgatgcagaaagtaataatttctcgggtagtttataatttttaaattatgttttaaaattaactatcacatacttaccgtaagtttaaagtagtgatttcttgcctttatatatcttctggcaaggac

SEQ ID NO: 8773 - DNA, 238 bp, synthetic construct; identical to SEQ ID NO: 8772
  misc_feature 1..238: note = promoter
  source 1..238: mol_type = other DNA

SEQ ID NO: 8774 - DNA, 238 bp, synthetic construct
  misc_feature 1..238: note = promoter
  source 1..238: mol_type = other DNA
gagggcctatttcccatgagtccttcatatttgcatataccatgcaaaaatattagagagataattagaattaatttggctgtaaacacaaaggtattagtacaagatattgatgcagaaagtaataatttctcgggtagtttataatttttaaattatgttttaaaattaactatcacatacttaccgtaagtttaaagtagttatttcttgcctttatatatcttctggcaaggac

SEQ ID NO: 8775 - DNA, 238 bp, synthetic construct
  misc_feature 1..238: note = promoter
  source 1..238: mol_type = other DNA
gagggcctatttcccatgagtccttcatatttgcatataccatgcaaaaatattagagagataattagaattaatttggctgtaaacacaaaggtattagtacaagatattgatgcagaaagtaataatttctcgggtagtttataatttttaaattatgttttaaaattaactatcacatacttaccgtaagtttaaagtagttttttcttgcctttatatatcttctggcaaggac

SEQ ID NO: 8776 - DNA, 238 bp, synthetic construct
  misc_feature 1..238: note = promoter
  source 1..238: mol_type = other DNA
gagggcctatttcccatgagtccttcatatttgcatataccatgcaaaaatattagagagataattagaattaatttggctgtaaacacaaaggtattagtacaagatattgatgcagaaagtaataatttctcgggtagtttataatttttaaattatgttttaaaattaactatcacatacttaccgtaagtttaaagtagtttgttcttgcctttatatatcttctggcaaggac

SEQ ID NO: 8777 - DNA, 238 bp, synthetic construct
  misc_feature 1..238: note = promoter
  source 1..238: mol_type = other DNA
gagggcctatttcccatgagtccttcatatttgcatataccatgcaaaaatattagagagataattagaattaatttggctgtaaacacaaaggtattagtacaagatattgatgcagaaagtaataatttctcgggtagtttataatttttaaattatgttttaaaattaactatcacatacttaccgtaagtttaaagtagtttgatcttgcctttatatatcttctggcaaggac

SEQ ID NO: 8778 - DNA, 238 bp, synthetic construct; identical to SEQ ID NO: 8777
  misc_feature 1..238: note = promoter
  source 1..238: mol_type = other DNA

SEQ ID NO: 8779 - DNA, 238 bp, synthetic construct
  misc_feature 1..238: note = promoter
  source 1..238: mol_type = other DNA
gagggcctatttcccatgagtccttcatatttgcatataccatgcaaaaatattagagagataattagaattaatttggctgtaaacacaaaggtattagtacaagatattgatgcagaaagtaataatttctcgggtagtttataatttttaaattatgttttaaaattaactatcacatacttaccgtaagtttaaagtagtttgattttgcctttatatatcttctggcaaggac

SEQ ID NO: 8780 - DNA, 238 bp, synthetic construct; identical to SEQ ID NO: 8779
  misc_feature 1..238: note = promoter
  source 1..238: mol_type = other DNA

SEQ ID NO: 8781 - DNA, 238 bp, synthetic construct
  misc_feature 1..238: note = promoter
  source 1..238: mol_type = other DNA
gagggcctatttcccatgagtccttcatatttgcatataccatgcaaaaatattagagagataattagaattaatttggctgtaaacacaaaggtattagtacaagatattgatgcagaaagtaataatttctcgggtagtttataatttttaaattatgttttaaaattaactatcacatacttaccgtaagtttaaagtagtttgatttcgcctttatatatcttctggcaaggac

SEQ ID NO: 8782 - DNA, 238 bp, synthetic construct
  misc_feature 1..238: note = promoter
  source 1..238: mol_type = other DNA
gagggcctatttcccatgagtccttcatatttgcatataccatgcaaaaatattagagagataattagaattaatttggctgtaaacacaaaggtattagtacaagatattgatgcagaaagtaataatttctcgggtagtttataatttttaaattatgttttaaaattaactatcacatacttaccgtaagtttaaagtagtttgatttctcctttatatatcttctggcaaggac

SEQ ID NO: 8783 - DNA, 238 bp, synthetic construct
  misc_feature 1..238: note = promoter
  source 1..238: mol_type = other DNA
gagggcctatttcccatgagtccttcatatttgcatataccatgcaaaaatattagagagataattagaattaatttggctgtaaacacaaaggtattagtacaagatattgatgcagaaagtaataatttctcgggtagtttataatttttaaattatgttttaaaattaactatcacatacttaccgtaagtttaaagtagtttgatttcttctttatatatcttctggcaaggac

SEQ ID NO: 8784 - DNA, 238 bp, synthetic construct
  misc_feature 1..238: note = promoter
  source 1..238: mol_type = other DNA
gagggcctatttcccatgagtccttcatatttgcatataccatgcaaaaatattagagagataattagaattaatttggctgtaaacacaaaggtattagtacaagatattgatgcagaaagtaataatttctcgggtagtttataatttttaaattatgttttaaaattaactatcacatacttaccgtaagtttaaagtagtttgatttcttgtttatatatcttctggcaaggac

SEQ ID NO: 8785 - DNA, 238 bp, synthetic construct
  misc_feature 1..238: note = promoter
  source 1..238: mol_type = other DNA
gagggcctatttcccatgagtccttcatatttgcatataccatgcaaaaatattagagagataattagaattaatttggctgtaaacacaaaggtattagtacaagatattgatgcagaaagtaataatttctcgggtagtttataatttttaaattatgttttaaaattaactatcacatacttaccgtaagtttaaagtagtttgatttcttgcttatatatcttctggcaaggac

SEQ ID NO: 8786 - DNA, 238 bp, synthetic construct
  misc_feature 1..238: note = promoter
  source 1..238: mol_type = other DNA
gagggcctatttcccatgagtccttcatatttgcatataccatgcaaaaatattagagagataattagaattaatttggctgtaaacacaaaggtattagtacaagatattgatgcagaaagtaataatttctcgggtagtttataatttttaaattatgttttaaaattaactatcacatacttaccgtaagtttaaagtagtttgatttcttgcctatatatcttctggcaaggac

SEQ ID NO: 8787 - DNA, 238 bp, synthetic construct; identical to SEQ ID NO: 8786
  misc_feature 1..238: note = promoter
  source 1..238: mol_type = other DNA

SEQ ID NO: 8788 - DNA, 238 bp, synthetic construct
  misc_feature 1..238: note = promoter
  source 1..238: mol_type = other DNA
gagggcctatttcccatgagtccttcatatttgcatataccatgcaaaaatattagagagataattagaattaatttggctgtaaacacaaaggtattagtacaagatattgatgcagaaagtaataatttctcgggtagtttataatttttaaattatgttttaaaattaactatcacatacttaccgtaagtttaaagtagtttgatttcttgcctttatatcttctggcaaggac

SEQ ID NO: 8789 - DNA, 238 bp, synthetic construct; identical to SEQ ID NO: 8788
  misc_feature 1..238: note = promoter
  source 1..238: mol_type = other DNA

SEQ ID NO: 8790 - DNA, 238 bp, synthetic construct; identical to SEQ ID NO: 8788
  misc_feature 1..238: note = promoter
  source 1..238: mol_type = other DNA

SEQ ID NO: 8791 - DNA, 238 bp, synthetic construct; identical to SEQ ID NO: 8788
  misc_feature 1..238: note = promoter
  source 1..238: mol_type = other DNA

SEQ ID NO: 8792 - DNA, 238 bp, synthetic construct; identical to SEQ ID NO: 8788
  misc_feature 1..238: note = promoter
  source 1..238: mol_type = other DNA

SEQ ID NO: 8793 - DNA, 238 bp, synthetic construct; identical to SEQ ID NO: 8788
  misc_feature 1..238: note = promoter
  source 1..238: mol_type = other DNA

SEQ ID NO: 8794 - DNA, 238 bp, synthetic construct
  misc_feature 1..238: note = promoter
  source 1..238: mol_type = other DNA
gagggcctatttcccatgagtccttcatatttgcatataccatgcaaaaatattagagagataattagaattaatttggctgtaaacacaaaggtattagtacaagatattgatgcagaaagtaataatttctcgggtagtttataatttttaaattatgttttaaaattaactatcacatacttaccgtaagtttaaagtagtttgatttcttgcctttatatattctggcaaggac

SEQ ID NO: 8795 - DNA, 238 bp, synthetic construct; identical to SEQ ID NO: 8794
  misc_feature 1..238: note = promoter
  source 1..238: mol_type = other DNA

SEQ ID NO: 8796 - DNA, 238 bp, synthetic construct
  misc_feature 1..238: note = promoter
  source 1..238: mol_type = other DNA
gagggcctatttcccatgagtccttcatatttgcatataccatgcaaaaatattagagagataattagaattaatttggctgtaaacacaaaggtattagtacaagatattgatgcagaaagtaataatttctcgggtagtttataatttttaaattatgttttaaaattaactatcacatacttaccgtaagtttaaagtagtttgatttcttgcctttatatatcctggcaaggac

SEQ ID NO: 8797 - DNA, 238 bp, synthetic construct
  misc_feature 1..238: note = promoter
  source 1..238: mol_type = other DNA
gagggcctatttcccatgagtccttcatatttgcatataccatgcaaaaatattagagagataattagaattaatttggctgtaaacacaaaggtattagtacaagatattgatgcagaaagtaataatttctcgggtagtttataatttttaaattatgttttaaaattaactatcacatacttaccgtaagtttaaagtagtttgatttcttgcctttatatatcttggcaaggac

SEQ ID NO: 8798 - DNA, 238 bp, synthetic construct; identical to SEQ ID NO: 8797
  misc_feature 1..238: note = promoter
  source 1..238: mol_type = other DNA

SEQ ID NO: 8799 - DNA, 238 bp, synthetic construct
  misc_feature 1..238: note = promoter
  source 1..238: mol_type = other DNA
gagggcctatttcccatgagtccttcatatttgcatataccatgcaaaaatattagagagataattagaattaatttggctgtaaacacaaaggtattagtacaagatattgatgcagaaagtaataatttctcgggtagtttataatttttaaattatgttttaaaattaactatcacatacttaccgtaagtttaaagtagtttgatttcttgcctttatatatcttcgcaaggac

SEQ ID NO: 8800 - DNA, 238 bp, synthetic construct
  misc_feature 1..238: note = promoter
  source 1..238: mol_type = other DNA
gagggcctatttcccatgagtccttcatatttgcatataccatgcaaaaatattagagagataattagaattaatttggctgtaaacacaaaggtattagtacaagatattgatgcagaaagtaataatttctcgggtagtttataatttttaaattatgttttaaaattaactatcacatacttaccgtaagtttaaagtagtttgatttcttgcctttatatatcttctcaaggac

SEQ ID NO: 8801 - DNA, 238 bp, synthetic construct
  misc_feature 1..238: note = promoter
  source 1..238: mol_type = other DNA
gagggcctatttcccatgagtccttcatatttgcatataccatgcaaaaatattagagagataattagaattaatttggctgtaaacacaaaggtattagtacaagatattgatgcagaaagtaataatttctcgggtagtttataatttttaaattatgttttaaaattaactatcacatacttaccgtaagtttaaagtagtttgatttcttgcctttatatatcttctgaaggac

SEQ ID NO: 8802 - DNA, 238 bp, synthetic construct
  misc_feature 1..238: note = promoter
  source 1..238: mol_type = other DNA
gagggcctatttcccatgagtccttcatatttgcatataccatgcaaaaatattagagagataattagaattaatttggctgtaaacacaaaggtattagtacaagatattgatgcagaaagtaataatttctcgggtagtttataatttttaaattatgttttaaaattaactatcacatacttaccgtaagtttaaagtagtttgatttcttgcctttatatatcttctggaggac

SEQ ID NO: 8803 - DNA, 238 bp, synthetic construct
  misc_feature 1..238: note = promoter
  source 1..238: mol_type = other DNA
gagggcctatttcccatgagtccttcatatttgcatataccatgcaaaaatattagagagataattagaattaatttggctgtaaacacaaaggtattagtacaagatattgatgcagaaagtaataatttctcgggtagtttataatttttaaattatgttttaaaattaactatcacatacttaccgtaagtttaaagtagtttgatttcttgcctttatatatcttctggcggac

SEQ ID NO: 8804 - DNA, 238 bp, synthetic construct
  misc_feature 1..238: note = promoter
  source 1..238: mol_type = other DNA
gagggcctatttcccatgagtccttcatatttgcatataccatgcaaaaatattagagagataattagaattaatttggctgtaaacacaaaggtattagtacaagatattgatgcagaaagtaataatttctcgggtagtttataatttttaaattatgttttaaaattaactatcacatacttaccgtaagtttaaagtagtttgatttcttgcctttatatatcttctggcagac

SEQ ID NO: 8805 - DNA, 238 bp, synthetic construct
  misc_feature 1..238: note = promoter
  source 1..238: mol_type = other DNA
gagggcctatttcccatgagtccttcatatttgcatataccatgcaaaaatattagagagataattagaattaatttggctgtaaacacaaaggtattagtacaagatattgatgcagaaagtaataatttctcgggtagtttataatttttaaattatgttttaaaattaactatcacatacttaccgtaagtttaaagtagtttgatttcttgcctttatatatcttctggcaaac

SEQ ID NO: 8806 - DNA, 238 bp, synthetic construct
  misc_feature 1..238: note = promoter
  source 1..238: mol_type = other DNA
gagggcctatttcccatgagtccttcatatttgcatataccatgcaaaaatattagagagataattagaattaatttggctgtaaacacaaaggtattagtacaagatattgatgcagaaagtaataatttctcgggtagtttataatttttaaattatgttttaaaattaactatcacatacttaccgtaagtttaaagtagtttgatttcttgcctttatatatcttctggcaagc

SEQ ID NO: 8807 - DNA, 238 bp, synthetic construct
  misc_feature 1..238: note = promoter
  source 1..238: mol_type = other DNA
gagggcctatttcccatgagtccttcatatttgcatataccatgcaaaaatattagagagataattagaattaatttggctgtaaacacaaaggtattagtacaagatattgatgcagaaagtaataatttctcgggtagtttataatttttaaattatgttttaaaattaactatcacatacttaccgtaagtttaaagtagtttgatttcttgcctttatatatcttctggcaagg

SEQ ID NO: 8808 - DNA, 239 bp, synthetic construct
  misc_feature 1..239: note = promoter
  source 1..239: mol_type = other DNA
gagggcctatttcccatgagtccttcatatttgcatataccatgcaaaaatattagagagataattagaattaatttggctgtaaacacaaaggtattagtacaagatattgatgcagaaagtaataatttctcgggtagtttataatttttaaattatgttttaaaattaactatcacatacttaccgtaagtttaaagtagtttgatttcttgcctttatatatcttctggcaagga

SEQ ID NO: 8809 - DNA, 230 bp, synthetic construct
  misc_feature 1..230: note = promoter
  source 1..230: mol_type = other DNA
ttcccatgagtccttcatatttgcatataccatgcaaaaatattagagagataattagaattaatttggctgtaaacacaaaggtattagtacaagatattgatgcagaaagtaataatttctcgggtagtttataatttttaaattatgttttaaaattaactatcacatacttaccgtaagtttaaagtagtttgatttcttgcctttatatatcttctggcaaggac

SEQ ID NO: 8810 - DNA, 230 bp, synthetic construct
  misc_feature 1..230: note = promoter
  source 1..230: mol_type = other DNA
gtcccatgagtccttcatatttgcatataccatgcaaaaatattagagagataattagaattaatttggctgtaaacacaaaggtattagtacaagatattgatgcagaaagtaataatttctcgggtagtttataatttttaaattatgttttaaaattaactatcacatacttaccgtaagtttaaagtagtttgatttcttgcctttatatatcttctggcaaggac

SEQ ID NO: 8811 - DNA, 230 bp, synthetic construct
  misc_feature 1..230: note = promoter
  source 1..230: mol_type = other DNA
gacccatgagtccttcatatttgcatataccatgcaaaaatattagagagataattagaattaatttggctgtaaacacaaaggtattagtacaagatattgatgcagaaagtaataatttctcgggtagtttataatttttaaattatgttttaaaattaactatcacatacttaccgtaagtttaaagtagtttgatttcttgcctttatatatcttctggcaaggac

SEQ ID NO: 8812 - DNA, 230 bp, synthetic construct
  misc_feature 1..230: note = promoter
  source 1..230: mol_type = other DNA
gagccatgagtccttcatatttgcatataccatgcaaaaatattagagagataattagaattaatttggctgtaaacacaaaggtattagtacaagatattgatgcagaaagtaataatttctcgggtagtttataatttttaaattatgttttaaaattaactatcacatacttaccgtaagtttaaagtagtttgatttcttgcctttatatatcttctggcaaggac

SEQ ID NO: 8813 - DNA, 230 bp, synthetic construct
  misc_feature 1..230: note = promoter
  source 1..230: mol_type = other DNA
gaggcatgagtccttcatatttgcatataccatgcaaaaatattagagagataattagaattaatttggctgtaaacacaaaggtattagtacaagatattgatgcagaaagtaataatttctcgggtagtttataatttttaaattatgttttaaaattaactatcacatacttaccgtaagtttaaagtagtttgatttcttgcctttatatatcttctggcaaggac

SEQ ID NO: 8814 - DNA, 230 bp, synthetic construct
  misc_feature 1..230: note = promoter
  source 1..230: mol_type = other DNA
gagggatgagtccttcatatttgcatataccatgcaaaaatattagagagataattagaattaatttggctgtaaacacaaaggtattagtacaagatattgatgcagaaagtaataatttctcgggtagtttataatttttaaattatgttttaaaattaactatcacatacttaccgtaagtttaaagtagtttgatttcttgcctttatatatcttctggcaaggac

SEQ ID NO: 8815 - DNA, 230 bp, synthetic construct
  misc_feature 1..230: note = promoter
  source 1..230: mol_type = other DNA
gagggctgagtccttcatatttgcatataccatgcaaaaatattagagagataattagaattaatttggctgtaaacacaaaggtattagtacaagatattgatgcagaaagtaataatttctcgggtagtttataatttttaaattatgttttaaaattaactatcacatacttaccgtaagtttaaagtagtttgatttcttgcctttatatatcttctggcaaggac

SEQ ID NO: 8816 - DNA, 230 bp, synthetic construct
  misc_feature 1..230: note = promoter
  source 1..230: mol_type = other DNA
gagggccgagtccttcatatttgcatataccatgcaaaaatattagagagataattagaattaatttggctgtaaacacaaaggtattagtacaagatattgatgcagaaagtaataatttctcgggtagtttataatttttaaattatgttttaaaattaactatcacatacttaccgtaagtttaaagtagtttgatttcttgcctttatatatcttctggcaaggac

SEQ ID NO: 8817 - DNA, 230 bp, synthetic construct
  misc_feature 1..230: note = promoter
  source 1..230: mol_type = other DNA
gagggcctagtccttcatatttgcatataccatgcaaaaatattagagagataattagaattaatttggctgtaaacacaaaggtattagtacaagatattgatgcagaaagtaataatttctcgggtagtttataatttttaaattatgttttaaaattaactatcacatacttaccgtaagtttaaagtagtttgatttcttgcctttatatatcttctggcaaggac

SEQ ID NO: 8818 - DNA, 230 bp, synthetic construct; identical to SEQ ID NO: 8817
  misc_feature 1..230: note = promoter
  source 1..230: mol_type = other DNA

SEQ ID NO: 8819 - DNA, 230 bp, synthetic construct
  misc_feature 1..230: note = promoter
  source 1..230: mol_type = other DNA
gagggcctattccttcatatttgcatataccatgcaaaaatattagagagataattagaattaatttggctgtaaacacaaaggtattagtacaagatattgatgcagaaagtaataatttctcgggtagtttataatttttaaattatgttttaaaattaactatcacatacttaccgtaagtttaaagtagtttgatttcttgcctttatatatcttctggcaaggac

SEQ ID NO: 8820 - DNA, 230 bp, synthetic construct; identical to SEQ ID NO: 8819
  misc_feature 1..230: note = promoter
  source 1..230: mol_type = other DNA

SEQ ID NO: 8821 - DNA, 230 bp, synthetic construct
  misc_feature 1..230: note = promoter
  source 1..230: mol_type = other DNA
gagggcctatttcttcatatttgcatataccatgcaaaaatattagagagataattagaattaatttggctgtaaacacaaaggtattagtacaagatattgatgcagaaagtaataatttctcgggtagtttataatttttaaattatgttttaaaattaactatcacatacttaccgtaagtttaaagtagtttgatttcttgcctttatatatcttctggcaaggac

SEQ ID NO: 8822 - DNA, 230 bp, synthetic construct; identical to SEQ ID NO: 8821
  misc_feature 1..230: note = promoter
  source 1..230: mol_type = other DNA

SEQ ID NO: 8823 - DNA, 230 bp, synthetic construct
  misc_feature 1..230: note = promoter
  source 1..230: mol_type = other DNA
gagggcctatttcctcatatttgcatataccatgcaaaaatattagagagataattagaattaatttggctgtaaacacaaaggtattagtacaagatattgatgcagaaagtaataatttctcgggtagtttataatttttaaattatgttttaaaattaactatcacatacttaccgtaagtttaaagtagtttgatttcttgcctttatatatcttctggcaaggac

SEQ ID NO: 8824 - DNA, 230 bp, synthetic construct
  misc_feature 1..230: note = promoter
  source 1..230: mol_type = other DNA
gagggcctatttccccatatttgcatataccatgcaaaaatattagagagataattagaattaatttggctgtaaacacaaaggtattagtacaagatattgatgcagaaagtaataatttctcgggtagtttataatttttaaattatgttttaaaattaactatcacatacttaccgtaagtttaaagtagtttgatttcttgcctttatatatcttctggcaaggac

SEQ ID NO: 8825 - DNA, 230 bp, synthetic construct
  misc_feature 1..230: note = promoter
  source 1..230: mol_type = other DNA
gagggcctatttcccaatatttgcatataccatgcaaaaatattagagagataattagaattaatttggctgtaaacacaaaggtattagtacaagatattgatgcagaaagtaataatttctcgggtagtttataatttttaaattatgttttaaaattaactatcacatacttaccgtaagtttaaagtagtttgatttcttgcctttatatatcttctggcaaggac

SEQ ID NO: 8826 - DNA, 230 bp, synthetic construct
  misc_feature 1..230: note = promoter
  source 1..230: mol_type = other DNA
gagggcctatttcccattatttgcatataccatgcaaaaatattagagagataattagaattaatttggctgtaaacacaaaggtattagtacaagatattgatgcagaaagtaataatttctcgggtagtttataatttttaaattatgttttaaaattaactatcacatacttaccgtaagtttaaagtagtttgatttcttgcctttatatatcttctggcaaggac

SEQ ID NO: 8827 - DNA, 230 bp, synthetic construct
  misc_feature 1..230: note = promoter
  source 1..230: mol_type = other DNA
gagggcctatttcccatgatttgcatataccatgcaaaaatattagagagataattagaattaatttggctgtaaacacaaaggtattagtacaagatattgatgcagaaagtaataatttctcgggtagtttataatttttaaattatgttttaaaattaactatcacatacttaccgtaagtttaaagtagtttgatttcttgcctttatatatcttctggcaaggac

SEQ ID NO: 8828 - DNA, 230 bp, synthetic construct; identical to SEQ ID NO: 8827
  misc_feature 1..230: note = promoter
  source 1..230: mol_type = other DNA

SEQ ID NO: 8829 - DNA, 230 bp, synthetic construct
  misc_feature 1..230: note = promoter
  source 1..230: mol_type = other DNA
gagggcctatttcccatgagttgcatataccatgcaaaaatattagagagataattagaattaatttggctgtaaacacaaaggtattagtacaagatattgatgcagaaagtaataatttctcgggtagtttataatttttaaattatgttttaaaattaactatcacatacttaccgtaagtttaaagtagtttgatttcttgcctttatatatcttctggcaaggac

SEQ ID NO: 8830 - DNA, 230 bp, synthetic construct; identical to SEQ ID NO: 8829
  misc_feature 1..230: note = promoter
  source 1..230: mol_type = other DNA

SEQ ID NO: 8831 - DNA, 230 bp, synthetic construct
  misc_feature 1..230: note = promoter
  source 1..230: mol_type = other DNA
gagggcctatttcccatgagtcgcatataccatgcaaaaatattagagagataattagaattaatttggctgtaaacacaaaggtattagtacaagatattgatgcagaaagtaataatttctcgggtagtttataatttttaaattatgttttaaaattaactatcacatacttaccgtaagtttaaagtagtttgatttcttgcctttatatatcttctggcaaggac

SEQ ID NO: 8832 - DNA, 230 bp, synthetic construct
  misc_feature 1..230: note = promoter
  source 1..230: mol_type = other DNA
gagggcctatttcccatgagtcccatataccatgcaaaaatattagagagataattagaattaatttggctgtaaacacaaaggtattagtacaagatattgatgcagaaagtaataatttctcgggtagtttataatttttaaattatgttttaaaattaactatcacatacttaccgtaagtttaaagtagtttgatttcttgcctttatatatcttctggcaaggac

SEQ ID NO: 8833 - DNA, 230 bp, synthetic construct
  misc_feature 1..230: note = promoter
  source 1..230: mol_type = other DNA
gagggcctatttcccatgagtcctatataccatgcaaaaatattagagagataattagaattaatttggctgtaaacacaaaggtattagtacaagatattgatgcagaaagtaataatttctcgggtagtttataatttttaaattatgttttaaaattaactatcacatacttaccgtaagtttaaagtagtttgatttcttgcctttatatatcttctggcaaggac

SEQ ID NO: 8834 - DNA, 230 bp, synthetic construct
  misc_feature 1..230: note = promoter
  source 1..230: mol_type = other DNA
gagggcctatttcccatgagtcctttataccatgcaaaaatattagagagataattagaattaatttggctgtaaacacaaaggtattagtacaagatattgatgcagaaagtaataatttctcgggtagtttataatttttaaattatgttttaaaattaactatcacatacttaccgtaagtttaaagtagtttgatttcttgcctttatatatcttctggcaaggac

SEQ ID NO: 8835 - DNA, 230 bp, synthetic construct
  misc_feature 1..230: note = promoter
  source 1..230: mol_type = other DNA
gagggcctatttcccatgagtccttcataccatgcaaaaatattagagagataattagaattaatttggctgtaaacacaaaggtattagtacaagatattgatgcagaaagtaataatttctcgggtagtttataatttttaaattatgttttaaaattaactatcacatacttaccgtaagtttaaagtagtttgatttcttgcctttatatatcttctggcaaggac

SEQ ID NO: 8836 - DNA, 230 bp, synthetic construct; identical to SEQ ID NO: 8835
  misc_feature 1..230: note = promoter
  source 1..230: mol_type = other DNA

SEQ ID NO: 8837 - DNA, 230 bp, synthetic construct; identical to SEQ ID NO: 8835
  misc_feature 1..230: note = promoter
  source 1..230: mol_type = other DNA

SEQ ID NO: 8838 - DNA, 230 bp, synthetic construct; identical to SEQ ID NO: 8835
  misc_feature 1..230: note = promoter
  source 1..230: mol_type = other DNA

SEQ ID NO: 8839 - DNA, 230 bp, synthetic construct
  misc_feature 1..230: note = promoter
  source 1..230: mol_type = other DNA
gagggcctatttcccatgagtccttcatatcatgcaaaaatattagagagataattagaattaatttggctgtaaacacaaaggtattagtacaagatattgatgcagaaagtaataatttctcgggtagtttataatttttaaattatgttttaaaattaactatcacatacttaccgtaagtttaaagtagtttgatttcttgcctttatatatcttctggcaaggac

SEQ ID NO: 8840 - DNA, 230 bp, synthetic construct
  misc_feature 1..230: note = promoter
  source 1..230: mol_type = other DNA
gagggcctatttcccatgagtccttcatattatgcaaaaatattagagagataattagaattaatttggctgtaaacacaaaggtattagtacaagatattgatgcagaaagtaataatttctcgggtagtttataatttttaaattatgttttaaaattaactatcacatacttaccgtaagtttaaagtagtttgatttcttgcctttatatatcttctggcaaggac

SEQ ID NO: 8841 - DNA, 230 bp, synthetic construct
  misc_feature 1..230: note = promoter
  source 1..230: mol_type = other DNA
gagggcctatttcccatgagtccttcatattttgcaaaaatattagagagataattagaattaatttggctgtaaacacaaaggtattagtacaagatattgatgcagaaagtaataatttctcgggtagtttataatttttaaattatgttttaaaattaactatcacatacttaccgtaagtttaaagtagtttgatttcttgcctttatatatcttctggcaaggac

SEQ ID NO: 8842 - DNA, 230 bp, synthetic construct
  misc_feature 1..230: note = promoter
  source 1..230: mol_type = other DNA
gagggcctatttcccatgagtccttcatatttggcaaaaatattagagagataattagaattaatttggctgtaaacacaaaggtattagtacaagatattgatgcagaaagtaataatttctcgggtagtttataatttttaaattatgttttaaaattaactatcacatacttaccgtaagtttaaagtagtttgatttcttgcctttatatatcttctggcaaggac

SEQ ID NO: 8843 - DNA, 230 bp, synthetic construct
  misc_feature 1..230: note = promoter
  source 1..230: mol_type = other DNA
gagggcctatttcccatgagtccttcatatttgccaaaaatattagagagataattagaattaatttggctgtaaacacaaaggtattagtacaagatattgatgcagaaagtaataatttctcgggtagtttataatttttaaattatgttttaaaattaactatcacatacttaccgtaagtttaaagtagtttgatttcttgcctttatatatcttctggcaaggac

SEQ ID NO: 8844 - DNA, 230 bp, synthetic construct
  misc_feature 1..230: note = promoter
  source 1..230: mol_type = other DNA
gagggcctatttcccatgagtccttcatatttgcaaaaaatattagagagataattagaattaatttggctgtaaacacaaaggtattagtacaagatattgatgcagaaagtaataatttctcgggtagtttataatttttaaattatgttttaaaattaactatcacatacttaccgtaagtttaaagtagtttgatttcttgcctttatatatcttctggcaaggac

SEQ ID NO: 8845 - DNA, 230 bp, synthetic construct
  misc_feature 1..230: note = promoter
  source 1..230: mol_type = other DNA
gagggcctatttcccatgagtccttcatatttgcataaaatattagagagataattagaattaatttggctgtaaacacaaaggtattagtacaagatattgatgcagaaagtaataatttctcgggtagtttataatttttaaattatgttttaaaattaactatcacatacttaccgtaagtttaaagtagtttgatttcttgcctttatatatcttctggcaaggac

SEQ ID NO: 8846 - DNA, 230 bp, synthetic construct; identical to SEQ ID NO: 8845
  misc_feature 1..230: note = promoter
  source 1..230: mol_type = other DNA

SEQ ID NO: 8847 - DNA, 230 bp, synthetic construct
  misc_feature 1..230: note = promoter
  source 1..230: mol_type = other DNA
gagggcctatttcccatgagtccttcatatttgcatataatattagagagataattagaattaatttggctgtaaacacaaaggtattagtacaagatattgatgcagaaagtaataatttctcgggtagtttataatttttaaattatgttttaaaattaactatcacatacttaccgtaagtttaaagtagtttgatttcttgcctttatatatcttctggcaaggac

SEQ ID NO: 8848 - DNA, 230 bp, synthetic construct; identical to SEQ ID NO: 8847
  misc_feature 1..230: note = promoter
  source 1..230: mol_type = other DNA

SEQ ID NO: 8849 - DNA, 230 bp, synthetic construct
  misc_feature 1..230: note = promoter
  source 1..230: mol_type = other DNA
gagggcctatttcccatgagtccttcatatttgcatatactattagagagataattagaattaatttggctgtaaacacaaaggtattagtacaagatattgatgcagaaagtaataatttctcgggtagtttataatttttaaattatgttttaaaattaactatcacatacttaccgtaagtttaaagtagtttgatttcttgcctttatatatcttctggcaaggac

SEQ ID NO: 8850 - DNA, 230 bp, synthetic construct
  misc_feature 1..230: note = promoter
  source 1..230: mol_type = other DNA
gagggcctatttcccatgagtccttcatatttgcatataccattagagagataattagaattaatttggctgtaaacacaaaggtattagtacaagatattgatgcagaaagtaataatttctcgggtagtttataatttttaaattatgttttaaaattaactatcacatacttaccgtaagtttaaagtagtttgatttcttgcctttatatatcttctggcaaggac

SEQ ID NO: 8851 - DNA, 230 bp, synthetic construct; identical to SEQ ID NO: 8850
  misc_feature 1..230: note = promoter
  source 1..230: mol_type = other DNA

SEQ ID NO: 8852 - DNA, 230 bp, synthetic construct; identical to SEQ ID NO: 8850
  misc_feature 1..230: note = promoter
  source 1..230: mol_type = other DNA

SEQ ID NO: 8853 - DNA, 230 bp, synthetic construct
  misc_feature 1..230: note = promoter
  source 1..230: mol_type = other DNA
gagggcctatttcccatgagtccttcatatttgcatataccatgagagagataattagaattaatttggctgtaaacacaaaggtattagtacaagatattgatgcagaaagtaataatttctcgggtagtttataatttttaaattatgttttaaaattaactatcacatacttaccgtaagtttaaagtagtttgatttcttgcctttatatatcttctggcaaggac

SEQ ID NO: 8854 - DNA, 230 bp, synthetic construct
  misc_feature 1..230: note = promoter
  source 1..230: mol_type = other DNA
gagggcctatttcccatgagtccttcatatttgcatataccatgcgagagataattagaattaatttggctgtaaacacaaaggtattagtacaagatattgatgcagaaagtaataatttctcgggtagtttataatttttaaattatgttttaaaattaactatcacatacttaccgtaagtttaaagtagtttgatttcttgcctttatatatcttctggcaaggac

SEQ ID NO: 8855 - DNA, 230 bp, synthetic construct
  misc_feature 1..230: note = promoter
  source 1..230: mol_type = other DNA
gagggcctatttcccatgagtccttcatatttgcatataccatgcaagagataattagaattaatttggctgtaaacacaaaggtattagtacaagatattgatgcagaaagtaataatttctcgggtagtttataatttttaaattatgttttaaaattaactatcacatacttaccgtaagtttaaagtagtttgatttcttgcctttatatatcttctggcaaggac

SEQ ID NO: 8856 - DNA, 230 bp, synthetic construct; identical to SEQ ID NO: 8855
  misc_feature 1..230: note = promoter
  source 1..230: mol_type = other DNA

SEQ ID NO: 8857 - DNA, 230 bp, synthetic construct
  misc_feature 1..230: note = promoter
  source 1..230: mol_type = other DNA
gagggcctatttcccatgagtccttcatatttgcatataccatgcaaaagataattagaattaatttggctgtaaacacaaaggtattagtacaagatattgatgcagaaagtaataatttctcgggtagtttataatttttaaattatgttttaaaattaactatcacatacttaccgtaagtttaaagtagtttgatttcttgcctttatatatcttctggcaaggac

SEQ ID NO: 8858 - DNA, 230 bp, synthetic construct; identical to SEQ ID NO: 8857
  misc_feature 1..230: note = promoter
  source 1..230: mol_type = other DNA

SEQ ID NO: 8859 - DNA, 230 bp, synthetic construct
  misc_feature 1..230: note = promoter
  source 1..230: mol_type = other DNA
gagggcctatttcccatgagtccttcatatttgcatataccatgcaaaaaataattagaattaatttggctgtaaacacaaaggtattagtacaagatattgatgcagaaagtaataatttctcgggtagtttataatttttaaattatgttttaaaattaactatcacatacttaccgtaagtttaaagtagtttgatttcttgcctttatatatcttctggcaaggac

SEQ ID NO: 8860 - DNA, 230 bp, synthetic construct
  misc_feature 1..230: note = promoter
  source 1..230: mol_type = other DNA
gagggcctatttcccatgagtccttcatatttgcatataccatgcaaaaattaattagaattaatttggctgtaaacacaaaggtattagtacaagatattgatgcagaaagtaataatttctcgggtagtttataatttttaaattatgttttaaaattaactatcacatacttaccgtaagtttaaagtagtttgatttcttgcctttatatatcttctggcaaggac

SEQ ID NO: 8861 - DNA, 230 bp, synthetic construct
  misc_feature 1..230: note = promoter
  source 1..230: mol_type = other DNA
gagggcctatttcccatgagtccttcatatttgcatataccatgcaaaaataaattagaattaatttggctgtaaacacaaaggtattagtacaagatattgatgcagaaagtaataatttctcgggtagtttataatttttaaattatgttttaaaattaactatcacatacttaccgtaagtttaaagtagtttgatttcttgcctttatatatcttctggcaaggac

SEQ ID NO: 8862 - DNA, 230 bp, synthetic construct
  misc_feature 1..230: note = promoter
  source 1..230: mol_type = other DNA
gagggcctatttcccatgagtccttcatatttgcatataccatgcaaaaatatattagaattaatttggctgtaaacacaaaggtattagtacaagatattgatgcagaaagtaataatttctcgggtagtttataatttttaaattatgttttaaaattaactatcacatacttaccgtaagtttaaagtagtttgatttcttgcctttatatatcttctggcaaggac

SEQ ID NO: 8863 - DNA, 230 bp, synthetic construct
  misc_feature 1..230: note = promoter
  source 1..230: mol_type = other DNA
gagggcctatttcccatgagtccttcatatttgcatataccatgcaaaaatattttagaattaatttggctgtaaacacaaaggtattagtacaagatattgatgcagaaagtaataatttctcgggtagtttataatttttaaattatgttttaaaattaactatcacatacttaccgtaagtttaaagtagtttgatttcttgcctttatatatcttctggcaaggac

SEQ ID NO: 8864 - DNA, 230 bp, synthetic construct
  misc_feature 1..230: note = promoter
  source 1..230: mol_type = other DNA
gagggcctatttcccatgagtccttcatatttgcatataccatgcaaaaatattatagaattaatttggctgtaaacacaaaggtattagtacaagatattgatgcagaaagtaataatttctcgggtagtttataatttttaaattatgttttaaaattaactatcacatacttaccgtaagtttaaagtagtttgatttcttgcctttatatatcttctggcaaggac

SEQ ID NO: 8865 - DNA, 230 bp, synthetic construct
  misc_feature 1..230: note = promoter
  source 1..230: mol_type = other DNA
gagggcctatttcccatgagtccttcatatttgcatataccatgcaaaaatattagagaattaatttggctgtaaacacaaaggtattagtacaagatattgatgcagaaagtaataatttctcgggtagtttataatttttaaattatgttttaaaattaactatcacatacttaccgtaagtttaaagtagtttgatttcttgcctttatatatcttctggcaaggac

SEQ ID NO: 8866 - DNA, 230 bp, synthetic construct; identical to SEQ ID NO: 8865
  misc_feature 1..230: note = promoter
  source 1..230: mol_type = other DNA

SEQ ID NO: 8867 - DNA, 230 bp, synthetic construct; identical to SEQ ID NO: 8865
  misc_feature 1..230: note = promoter
  source 1..230: mol_type = other DNA

SEQ ID NO: 8868 - DNA, 230 bp, synthetic construct; identical to SEQ ID NO: 8865
  misc_feature 1..230: note = promoter
  source 1..230: mol_type = other DNA

SEQ ID NO: 8869 - DNA, 230 bp, synthetic construct
  misc_feature 1..230: note = promoter
  source 1..230: mol_type = other DNA
gagggcctatttcccatgagtccttcatatttgcatataccatgcaaaaatattagagagttaatttggctgtaaacacaaaggtattagtacaagatattgatgcagaaagtaataatttctcgggtagtttataatttttaaattatgttttaaaattaactatcacatacttaccgtaagtttaaagtagtttgatttcttgcctttatatatcttctggcaaggac

SEQ ID NO: 8870 - DNA, 230 bp, synthetic construct
  misc_feature 1..230: note = promoter
  source 1..230: mol_type = other DNA
gagggcctatttcccatgagtccttcatatttgcatataccatgcaaaaatattagagagataatttggctgtaaacacaaaggtattagtacaagatattgatgcagaaagtaataatttctcgggtagtttataatttttaaattatgttttaaaattaactatcacatacttaccgtaagtttaaagtagtttgatttcttgcctttatatatcttctggcaaggac

SEQ ID NO: 8871 - DNA, 230 bp, synthetic construct; identical to SEQ ID NO: 8870
  misc_feature 1..230: note = promoter
  source 1..230: mol_type = other DNA

SEQ ID NO: 8872 - DNA, 230 bp, synthetic construct; identical to SEQ ID NO: 8870
  misc_feature 1..230: note = promoter
  source 1..230: mol_type = other DNA

SEQ ID NO: 8873 - DNA, 230 bp, synthetic construct; identical to SEQ ID NO: 8870
  misc_feature 1..230: note = promoter
  source 1..230: mol_type = other DNA

SEQ ID NO: 8874 - DNA, 230 bp, synthetic construct; identical to SEQ ID NO: 8870
  misc_feature 1..230: note = promoter
  source 1..230: mol_type = other DNA

SEQ ID NO: 8875 - DNA, 230 bp, synthetic construct; identical to SEQ ID NO: 8870
  misc_feature 1..230: note = promoter
  source 1..230: mol_type = other DNA

SEQ ID NO: 8876 - DNA, 230 bp, synthetic construct
  misc_feature 1..230: note = promoter
  source 1..230: mol_type = other DNA
gagggcctatttcccatgagtccttcatatttgcatataccatgcaaaaatattagagagataattaggctgtaaacacaaaggtattagtacaagatattgatgcagaaagtaataatttctcgggtagtttataatttttaaattatgttttaaaattaactatcacatacttaccgtaagtttaaagtagtttgatttcttgcctttatatatcttctggcaaggac

SEQ ID NO: 8877 - DNA, 230 bp, synthetic construct; identical to SEQ ID NO: 8876
  misc_feature 1..230: note = promoter
  source 1..230: mol_type = other DNA

SEQ ID NO: 8878 - DNA, 230 bp, synthetic construct
  misc_feature 1..230: note = promoter
  source 1..230: mol_type = other DNA
gagggcctatttcccatgagtccttcatatttgcatataccatgcaaaaatattagagagataattagactgtaaacacaaaggtattagtacaagatattgatgcagaaagtaataatttctcgggtagtttataatttttaaattatgttttaaaattaactatcacatacttaccgtaagtttaaagtagtttgatttcttgcctttatatatcttctggcaaggac

SEQ ID NO: 8879 - DNA, 230 bp, synthetic construct
  misc_feature 1..230: note = promoter
  source 1..230: mol_type = other DNA
gagggcctatttcccatgagtccttcatatttgcatataccatgcaaaaatattagagagataattagaatgtaaacacaaaggtattagtacaagatattgatgcagaaagtaataatttctcgggtagtttataatttttaaattatgttttaaaattaactatcacatacttaccgtaagtttaaagtagtttgatttcttgcctttatatatcttctggcaaggac

SEQ ID NO: 8880 - DNA, 230 bp, synthetic construct; identical to SEQ ID NO: 8879
  misc_feature 1..230: note = promoter
  source 1..230: mol_type = other DNA

SEQ ID NO: 8881 - DNA, 230 bp, synthetic construct
  misc_feature 1..230: note = promoter
  source 1..230: mol_type = other DNA
gagggcctatttcccatgagtccttcatatttgcatataccatgcaaaaatattagagagataattagaatttaaacacaaaggtattagtacaagatattgatgcagaaagtaataatttctcgggtagtttataatttttaaattatgttttaaaattaactatcacatacttaccgtaagtttaaagtagtttgatttcttgcctttatatatcttctggcaaggac

SEQ ID NO: 8882 - DNA, 230 bp, synthetic construct
  misc_feature 1..230: note = promoter
  source 1..230: mol_type = other DNA
gagggcctatttcccatgagtccttcatatttgcatataccatgcaaaaatattagagagataattagaattaaaacacaaaggtattagtacaagatattgatgcagaaagtaataatttctcgggtagtttataatttttaaattatgttttaaaattaactatcacatacttaccgtaagtttaaagtagtttgatttcttgcctttatatatcttctggcaaggac

SEQ ID NO: 8883 - DNA, 230 bp, synthetic construct; identical to SEQ ID NO: 8882
  misc_feature 1..230: note = promoter
  source 1..230: mol_type = other DNA

SEQ ID NO: 8884 - DNA, 230 bp, synthetic construct
  misc_feature 1..230: note = promoter
  source 1..230: mol_type = other DNA
gagggcctatttcccatgagtccttcatatttgcatataccatgcaaaaatattagagagataattagaattaatacacaaaggtattagtacaagatattgatgcagaaagtaataatttctcgggtagtttataatttttaaattatgttttaaaattaactatcacatacttaccgtaagtttaaagtagtttgatttcttgcctttatatatcttctggcaaggac

SEQ ID NO: 8885 - DNA, 230 bp, synthetic construct
  misc_feature 1..230: note = promoter
  source 1..230: mol_type = other DNA
gagggcctatttcccatgagtccttcatatttgcatataccatgcaaaaatattagagagataattagaattaattcacaaaggtattagtacaagatattgatgcagaaagtaataatttctcgggtagtttataatttttaaattatgttttaaaattaactatcacatacttaccgtaagtttaaagtagtttgatttcttgcctttatatatcttctggcaaggac

SEQ ID NO: 8886 - DNA, 230 bp, synthetic construct
  misc_feature 1..230: note = promoter
  source 1..230: mol_type = other DNA
gagggcctatttcccatgagtccttcatatttgcatataccatgcaaaaatattagagagataattagaattaatttacaaaggtattagtacaagatattgatgcagaaagtaataatttctcgggtagtttataatttttaaattatgttttaaaattaactatcacatacttaccgtaagtttaaagtagtttgatttcttgcctttatatatcttctggcaaggac

SEQ ID NO: 8887 - DNA, 230 bp, synthetic construct
  misc_feature 1..230: note = promoter
  source 1..230: mol_type = other DNA
gagggcctatttcccatgagtccttcatatttgcatataccatgcaaaaatattagagagataattagaattaatttgcaaaggtattagtacaagatattgatgcagaaagtaataatttctcgggtagtttataatttttaaattatgttttaaaattaactatcacatacttaccgtaagtttaaagtagtttgatttcttgcctttatatatcttctggcaaggac

SEQ ID NO: 8888 - DNA, 230 bp, synthetic construct
  misc_feature 1..230: note = promoter
  source 1..230: mol_type = other DNA
gagggcctatttcccatgagtccttcatatttgcatataccatgcaaaaatattagagagataattagaattaatttggaaaggtattagtacaagatattgatgcagaaagtaataatttctcgggtagtttataatttttaaattatgttttaaaattaactatcacatacttaccgtaagtttaaagtagtttgatttcttgcctttatatatcttctggcaaggac

SEQ ID NO: 8889 - DNA, 230 bp, synthetic construct
  misc_feature 1..230: note = promoter
  source 1..230: mol_type = other DNA
gagggcctatttcccatgagtccttcatatttgcatataccatgcaaaaatattagagagataattagaattaatttggcaaggtattagtacaagatattgatgcagaaagtaataatttctcgggtagtttataatttttaaattatgttttaaaattaactatcacatacttaccgtaagtttaaagtagtttgatttcttgcctttatatatcttctggcaaggac

SEQ ID NO: 8890 - DNA, 230 bp, synthetic construct
  misc_feature 1..230: note = promoter
  source 1..230: mol_type = other DNA
gagggcctatttcccatgagtccttcatatttgcatataccatgcaaaaatattagagagataattagaattaatttggctaggtattagtacaagatattgatgcagaaagtaataatttctcgggtagtttataatttttaaattatgttttaaaattaactatcacatacttaccgtaagtttaaagtagtttgatttcttgcctttatatatcttctggcaaggac

SEQ ID NO: 8891 - DNA, 230 bp, synthetic construct
  misc_feature 1..230: note = promoter
  source 1..230: mol_type = other DNA
gagggcctatttcccatgagtccttcatatttgcatataccatgcaaaaatattagagagataattagaattaatttggctgggtattagtacaagatattgatgcagaaagtaataatttctcgggtagtttataatttttaaattatgttttaaaattaactatcacatacttaccgtaagtttaaagtagtttgatttcttgcctttatatatcttctggcaaggac

SEQ ID NO: 8892 - DNA, 230 bp, synthetic construct
  misc_feature 1..230: note = promoter
  source 1..230: mol_type = other DNA
gagggcctatttcccatgagtccttcatatttgcatataccatgcaaaaatattagagagataattagaattaatttggctgtgtattagtacaagatattgatgcagaaagtaataatttctcgggtagtttataatttttaaattatgttttaaaattaactatcacatacttaccgtaagtttaaagtagtttgatttcttgcctttatatatcttctggcaaggac

SEQ ID NO: 8893 - DNA, 230 bp, synthetic construct
  misc_feature 1..230: note = promoter
  source 1..230: mol_type = other DNA
gagggcctatttcccatgagtccttcatatttgcatataccatgcaaaaatattagagagataattagaattaatttggctgtatattagtacaagatattgatgcagaaagtaataatttctcgggtagtttataatttttaaattatgttttaaaattaactatcacatacttaccgtaagtttaaagtagtttgatttcttgcctttatatatcttctggcaaggac

SEQ ID NO: 8894 - DNA, 230 bp, synthetic construct
  misc_feature 1..230: note = promoter
  source 1..230: mol_type = other DNA
gagggcctatttcccatgagtccttcatatttgcatataccatgcaaaaatattagagagataattagaattaatttggctgtaaattagtacaagatattgatgcagaaagtaataatttctcgggtagtttataatttttaaattatgttttaaaattaactatcacatacttaccgtaagtttaaagtagtttgatttcttgcctttatatatcttctggcaaggac

SEQ ID NO: 8895 - DNA, 230 bp, synthetic construct; identical to SEQ ID NO: 8894
  misc_feature 1..230: note = promoter
  source 1..230: mol_type = other DNA

SEQ ID NO: 8896 - DNA, 230 bp, synthetic construct
  misc_feature 1..230: note = promoter
  source 1..230: mol_type = other DNA
gagggcctatttcccatgagtccttcatatttgcatataccatgcaaaaatattagagagataattagaattaatttggctgtaaactagtacaagatattgatgcagaaagtaataatttctcgggtagtttataatttttaaattatgttttaaaattaactatcacatacttaccgtaagtttaaagtagtttgatttcttgcctttatatatcttctggcaaggac

SEQ ID NO: 8897 - DNA, 230 bp, synthetic construct
  misc_feature 1..230: note = promoter
  source 1..230: mol_type = other DNA
gagggcctatttcccatgagtccttcatatttgcatataccatgcaaaaatattagagagataattagaattaatttggctgtaaacaagtacaagatattgatgcagaaagtaataatttctcgggtagtttataatttttaaattatgttttaaaattaactatcacatacttaccgtaagtttaaagtagtttgatttcttgcctttatatatcttctggcaaggac

SEQ ID NO: 8898 - DNA, 230 bp, synthetic construct
  misc_feature 1..230: note = promoter
  source 1..230: mol_type = other DNA
gagggcctatttcccatgagtccttcatatttgcatataccatgcaaaaatattagagagataattagaattaatttggctgtaaacacgtacaagatattgatgcagaaagtaataatttctcgggtagtttataatttttaaattatgttttaaaattaactatcacatacttaccgtaagtttaaagtagtttgatttcttgcctttatatatcttctggcaaggac

SEQ ID NO: 8899 - DNA, 230 bp, synthetic construct
  misc_feature 1..230: note = promoter
  source 1..230: mol_type = other DNA
gagggcctatttcccatgagtccttcatatttgcatataccatgcaaaaatattagagagataattagaattaatttggctgtaaacacatacaagatattgatgcagaaagtaataatttctcgggtagtttataatttttaaattatgttttaaaattaactatcacatacttaccgtaagtttaaagtagtttgatttcttgcctttatatatcttctggcaaggac

SEQ ID NO: 8900 - DNA, 230 bp, synthetic construct
  misc_feature 1..230: note = promoter
  source 1..230: mol_type = other DNA
gagggcctatttcccatgagtccttcatatttgcatataccatgcaaaaatattagagagataattagaattaatttggctgtaaacacaaacaagatattgatgcagaaagtaataatttctcgggtagtttataatttttaaattatgttttaaaattaactatcacatacttaccgtaagtttaaagtagtttgatttcttgcctttatatatcttctggcaaggac

SEQ ID NO: 8901 - DNA, 230 bp, synthetic construct; identical to SEQ ID NO: 8900
  misc_feature 1..230: note = promoter
  source 1..230: mol_type = other DNA

SEQ ID NO: 8902 - DNA, 230 bp, synthetic construct
  misc_feature 1..230: note = promoter
  source 1..230: mol_type = other DNA
gagggcctatttcccatgagtccttcatatttgcatataccatgcaaaaatattagagagataattagaattaatttggctgtaaacacaaagaagatattgatgcagaaagtaataatttctcgggtagtttataatttttaaattatgttttaaaattaactatcacatacttaccgtaagtttaaagtagtttgatttcttgcctttatatatcttctggcaaggac

SEQ ID NO: 8903 - DNA, 230 bp, synthetic construct
  misc_feature 1..230: note = promoter
  source 1..230: mol_type = other DNA
gagggcctatttcccatgagtccttcatatttgcatataccatgcaaaaatattagagagataattagaattaatttggctgtaaacacaaaggagatattgatgcagaaagtaataatttctcgggtagtttataatttttaaattatgttttaaaattaactatcacatacttaccgtaagtttaaagtagtttgatttcttgcctttatatatcttctggcaaggac

SEQ ID NO: 8904 - DNA, 230 bp, synthetic construct
  misc_feature 1..230: note = promoter
  source 1..230: mol_type = other DNA
gagggcctatttcccatgagtccttcatatttgcatataccatgcaaaaatattagagagataattagaattaatttggctgtaaacacaaaggtgatattgatgcagaaagtaataatttctcgggtagtttataatttttaaattatgttttaaaattaactatcacatacttaccgtaagtttaaagtagtttgatttcttgcctttatatatcttctggcaaggac

SEQ ID NO: 8905 - DNA, 230 bp, synthetic construct
  misc_feature 1..230: note = promoter
  source 1..230: mol_type = other DNA
gagggcctatttcccatgagtccttcatatttgcatataccatgcaaaaatattagagagataattagaattaatttggctgtaaacacaaaggtaatattgatgcagaaagtaataatttctcgggtagtttataatttttaaattatgttttaaaattaactatcacatacttaccgtaagtttaaagtagtttgatttcttgcctttatatatcttctggcaaggac

SEQ ID NO: 8906 - DNA, 230 bp, synthetic construct
  misc_feature 1..230: note = promoter
  source 1..230: mol_type = other DNA
gagggcctatttcccatgagtccttcatatttgcatataccatgcaaaaatattagagagataattagaattaatttggctgtaaacacaaaggtattattgatgcagaaagtaataatttctcgggtagtttataatttttaaattatgttttaaaattaactatcacatacttaccgtaagtttaaagtagtttgatttcttgcctttatatatcttctggcaaggac

SEQ ID NO: 8907 - DNA, 230 bp, synthetic construct; identical to SEQ ID NO: 8906
  misc_feature 1..230: note = promoter
  source 1..230: mol_type = other DNA

SEQ ID NO: 8908 - DNA, 230 bp, synthetic construct; identical to SEQ ID NO: 8906
  misc_feature 1..230: note = promoter
  source 1..230: mol_type = other DNA

SEQ ID NO: 8909 - DNA, 230 bp, synthetic construct
  misc_feature 1..230: note = promoter
  source 1..230: mol_type = other DNA
gagggcctatttcccatgagtccttcatatttgcatataccatgcaaaaatattagagagataattagaattaatttggctgtaaacacaaaggtattagtgatgcagaaagtaataatttctcgggtagtttataatttttaaattatgttttaaaattaactatcacatacttaccgtaagtttaaagtagtttgatttcttgcctttatatatcttctggcaaggac

SEQ ID NO: 8910 - DNA, 230 bp, synthetic construct; identical to SEQ ID NO: 8909
  misc_feature 1..230: note = promoter
  source 1..230: mol_type = other DNA

SEQ ID NO: 8911 - DNA, 230 bp, synthetic construct
  misc_feature 1..230: note = promoter
  source 1..230: mol_type = other DNA
gagggcctatttcccatgagtccttcatatttgcatataccatgcaaaaatattagagagataattagaattaatttggctgtaaacacaaaggtattagtaatgcagaaagtaataatttctcgggtagtttataatttttaaattatgttttaaaattaactatcacatacttaccgtaagtttaaagtagtttgatttcttgcctttatatatcttctggcaaggac

SEQ ID NO: 8912 - DNA, 230 bp, synthetic construct
  misc_feature 1..230: note = promoter
  source 1..230: mol_type = other DNA
gagggcctatttcccatgagtccttcatatttgcatataccatgcaaaaatattagagagataattagaattaatttggctgtaaacacaaaggtattagtactgcagaaagtaataatttctcgggtagtttataatttttaaattatgttttaaaattaactatcacatacttaccgtaagtttaaagtagtttgatttcttgcctttatatatcttctggcaaggac

SEQ ID NO: 8913 - DNA, 230 bp, synthetic construct
  misc_feature 1..230: note = promoter
  source 1..230: mol_type = other DNA
gagggcctatttcccatgagtccttcatatttgcatataccatgcaaaaatattagagagataattagaattaatttggctgtaaacacaaaggtattagtacagcagaaagtaataatttctcgggtagtttataatttttaaattatgttttaaaattaactatcacatacttaccgtaagtttaaagtagtttgatttcttgcctttatatatcttctggcaaggac

SEQ ID NO: 8914 - DNA, 230 bp, synthetic construct
  misc_feature 1..230: note = promoter
  source 1..230: mol_type = other DNA
gagggcctatttcccatgagtccttcatatttgcatataccatgcaaaaatattagagagataattagaattaatttggctgtaaacacaaaggtattagtacaacagaaagtaataatttctcgggtagtttataatttttaaattatgttttaaaattaactatcacatacttaccgtaagtttaaagtagtttgatttcttgcctttatatatcttctggcaaggac

SEQ ID NO: 8915 - DNA, 230 bp, synthetic construct
  misc_feature 1..230: note = promoter
  source 1..230: mol_type = other DNA
gagggcctatttcccatgagtccttcatatttgcatataccatgcaaaaatattagagagataattagaattaatttggctgtaaacacaaaggtattagtacaagagaaagtaataatttctcgggtagtttataatttttaaattatgttttaaaattaactatcacatacttaccgtaagtttaaagtagtttgatttcttgcctttatatatcttctggcaaggac

SEQ ID NO: 8916 - DNA, 230 bp, synthetic construct; identical to SEQ ID NO: 8915
  misc_feature 1..230: note = promoter
  source 1..230: mol_type = other DNA

SEQ ID NO: 8917 - DNA, 230 bp, synthetic construct
  misc_feature 1..230: note = promoter
  source 1..230: mol_type = other DNA
gagggcctatttcccatgagtccttcatatttgcatataccatgcaaaaatattagagagataattagaattaatttggctgtaaacacaaaggtattagtacaagataaagtaataatttctcgggtagtttataatttttaaattatgttttaaaattaactatcacatacttaccgtaagtttaaagtagtttgatttcttgcctttatatatcttctggcaaggac

SEQ ID NO: 8918 - DNA, 230 bp, synthetic construct; identical to SEQ ID NO: 8917
  misc_feature 1..230: note = promoter
  source 1..230: mol_type = other DNA

SEQ ID NO: 8919 - DNA, 230 bp, synthetic construct
  misc_feature 1..230: note = promoter
  source 1..230: mol_type = other DNA
gagggcctatttcccatgagtccttcatatttgcatataccatgcaaaaatattagagagataattagaattaatttggctgtaaacacaaaggtattagtacaagatatagtaataatttctcgggtagtttataatttttaaattatgttttaaaattaactatcacatacttaccgtaagtttaaagtagtttgatttcttgcctttatatatcttctggcaaggac

SEQ ID NO: 8920 - DNA, 230 bp, synthetic construct
  misc_feature 1..230: note = promoter
  source 1..230: mol_type = other DNA
gagggcctatttcccatgagtccttcatatttgcatataccatgcaaaaatattagagagataattagaattaatttggctgtaaacacaaaggtattagtacaagatattgtaataatttctcgggtagtttataatttttaaattatgttttaaaattaactatcacatacttaccgtaagtttaaagtagtttgatttcttgcctttatatatcttctggcaaggac

SEQ ID NO: 8921 - DNA, 230 bp, synthetic construct; identical to SEQ ID NO: 8920
  misc_feature 1..230: note = promoter
  source 1..230: mol_type = other DNA

SEQ ID NO: 8922 - DNA, 230 bp, synthetic construct
  misc_feature 1..230: note = promoter
  source 1..230: mol_type = other DNA
gagggcctatttcccatgagtccttcatatttgcatataccatgcaaaaatattagagagataattagaattaatttggctgtaaacacaaaggtattagtacaagatattgaaataatttctcgggtagtttataatttttaaattatgttttaaaattaactatcacatacttaccgtaagtttaaagtagtttgatttcttgcctttatatatcttctggcaaggac

SEQ ID NO: 8923 - DNA, 230 bp, synthetic construct
  misc_feature 1..230: note = promoter
  source 1..230: mol_type = other DNA
gagggcctatttcccatgagtccttcatatttgcatataccatgcaaaaatattagagagataattagaattaatttggctgtaaacacaaaggtattagtacaagatattgatataatttctcgggtagtttataatttttaaattatgttttaaaattaactatcacatacttaccgtaagtttaaagtagtttgatttcttgcctttatatatcttctggcaaggac

SEQ ID NO: 8924 - DNA, 230 bp, synthetic construct
  misc_feature 1..230: note = promoter
  source 1..230: mol_type = other DNA
gagggcctatttcccatgagtccttcatatttgcatataccatgcaaaaatattagagagataattagaattaatttggctgtaaacacaaaggtattagtacaagatattgatgtaatttctcgggtagtttataatttttaaattatgttttaaaattaactatcacatacttaccgtaagtttaaagtagtttgatttcttgcctttatatatcttctggcaaggac

SEQ ID NO: 8925 - DNA, 230 bp, synthetic construct
  misc_feature 1..230: note = promoter
  source 1..230: mol_type = other DNA
gagggcctatttcccatgagtccttcatatttgcatataccatgcaaaaatattagagagataattagaattaatttggctgtaaacacaaaggtattagtacaagatattgatgcaatttctcgggtagtttataatttttaaattatgttttaaaattaactatcacatacttaccgtaagtttaaagtagtttgatttcttgcctttatatatcttctggcaaggac

SEQ ID NO: 8926 - DNA, 230 bp, synthetic construct; identical to SEQ ID NO: 8925
  misc_feature 1..230: note = promoter
  source 1..230: mol_type = other DNA

SEQ ID NO: 8927 - DNA, 230 bp, synthetic construct
  misc_feature 1..230: note = promoter
  source 1..230: mol_type = other DNA
gagggcctatttcccatgagtccttcatatttgcatataccatgcaaaaatattagagagataattagaattaatttggctgtaaacacaaaggtattagtacaagatattgatgcagtttctcgggtagtttataatttttaaattatgttttaaaattaactatcacatacttaccgtaagtttaaagtagtttgatttcttgcctttatatatcttctggcaaggac

SEQ ID NO: 8928 - DNA, 230 bp, synthetic construct
  misc_feature 1..230: note = promoter
  source 1..230: mol_type = other DNA
gagggcctatttcccatgagtccttcatatttgcatataccatgcaaaaatattagagagataattagaattaatttggctgtaaacacaaaggtattagtacaagatattgatgcagattctcgggtagtttataatttttaaattatgttttaaaattaactatcacatacttaccgtaagtttaaagtagtttgatttcttgcctttatatatcttctggcaaggac

SEQ ID NO: 8929 - DNA, 230 bp, synthetic construct
  misc_feature 1..230: note = promoter
  source 1..230: mol_type = other DNA
gagggcctatttcccatgagtccttcatatttgcatataccatgcaaaaatattagagagataattagaattaatttggctgtaaacacaaaggtattagtacaagatattgatgcagaatctcgggtagtttataatttttaaattatgttttaaaattaactatcacatacttaccgtaagtttaaagtagtttgatttcttgcctttatatatcttctggcaaggac

SEQ ID NO: 8930 - DNA, 230 bp, synthetic construct
  misc_feature 1..230: note = promoter
  source 1..230: mol_type = other DNA
gagggcctatttcccatgagtccttcatatttgcatataccatgcaaaaatattagagagataattagaattaatttggctgtaaacacaaaggtattagtacaagatattgatgcagaaactcgggtagtttataatttttaaattatgttttaaaattaactatcacatacttaccgtaagtttaaagtagtttgatttcttgcctttatatatcttctggcaaggac

SEQ ID NO: 8931 - DNA, 230 bp, synthetic construct
  misc_feature 1..230: note = promoter
  source 1..230: mol_type = other DNA
gagggcctatttcccatgagtccttcatatttgcatataccatgcaaaaatattagagagataattagaattaatttggctgtaaacacaaaggtattagtacaagatattgatgcagaaagtcgggtagtttataatttttaaattatgttttaaaattaactatcacatacttaccgtaagtttaaagtagtttgatttcttgcctttatatatcttctggcaaggac

SEQ ID NO: 8932 - DNA, 230 bp, synthetic construct; identical to SEQ ID NO: 8931
  misc_feature 1..230: note = promoter
  source 1..230: mol_type = other DNA

SEQ ID NO: 8933 - DNA, 230 bp, synthetic construct
  misc_feature 1..230: note = promoter
  source 1..230: mol_type = other DNA
gagggcctatttcccatgagtccttcatatttgcatataccatgcaaaaatattagagagataattagaattaatttggctgtaaacacaaaggtattagtacaagatattgatgcagaaagtagggtagtttataatttttaaattatgttttaaaattaactatcacatacttaccgtaagtttaaagtagtttgatttcttgcctttatatatcttctggcaaggac

SEQ ID NO: 8934 - DNA, 230 bp, synthetic construct
  misc_feature 1..230: note = promoter
  source 1..230: mol_type = other DNA
gagggcctatttcccatgagtccttcatatttgcatataccatgcaaaaatattagagagataattagaattaatttggctgtaaacacaaaggtattagtacaagatattgatgcagaaagtaaggtagtttataatttttaaattatgttttaaaattaactatcacatacttaccgtaagtttaaagtagtttgatttcttgcctttatatatcttctggcaaggac

SEQ ID NO: 8935 - DNA, 230 bp, synthetic construct
  misc_feature 1..230: note = promoter
  source 1..230: mol_type = other DNA
gagggcctatttcccatgagtccttcatatttgcatataccatgcaaaaatattagagagataattagaattaatttggctgtaaacacaaaggtattagtacaagatattgatgcagaaagtaatgtagtttataatttttaaattatgttttaaaattaactatcacatacttaccgtaagtttaaagtagtttgatttcttgcctttatatatcttctggcaaggac

SEQ ID NO: 8936 - DNA, 230 bp, synthetic construct
  misc_feature 1..230: note = promoter
  source 1..230: mol_type = other DNA
gagggcctatttcccatgagtccttcatatttgcatataccatgcaaaaatattagagagataattagaattaatttggctgtaaacacaaaggtattagtacaagatattgatgcagaaagtaatatagtttataatttttaaattatgttttaaaattaactatcacatacttaccgtaagtttaaagtagtttgatttcttgcctttatatatcttctggcaaggac

SEQ ID NO: 8937 - DNA, 230 bp, synthetic construct
  misc_feature 1..230: note = promoter
  source 1..230: mol_type = other DNA
gagggcctatttcccatgagtccttcatatttgcatataccatgcaaaaatattagagagataattagaattaatttggctgtaaacacaaaggtattagtacaagatattgatgcagaaagtaataaagtttataatttttaaattatgttttaaaattaactatcacatacttaccgtaagtttaaagtagtttgatttcttgcctttatatatcttctggcaaggac

SEQ ID NO: 8938 - DNA, 230 bp, synthetic construct
  misc_feature 1..230: note = promoter
  source 1..230: mol_type = other DNA
gagggcctatttcccatgagtccttcatatttgcatataccatgcaaaaatattagagagataattagaattaatttggctgtaaacacaaaggtattagtacaagatattgatgcagaaagtaataatgtttataatttttaaattatgttttaaaattaactatcacatacttaccgtaagtttaaagtagtttgatttcttgcctttatatatcttctggcaaggac

SEQ ID NO: 8939 - DNA, 230 bp, synthetic construct
  misc_feature 1..230: note = promoter
  source 1..230: mol_type = other DNA
gagggcctatttcccatgagtccttcatatttgcatataccatgcaaaaatattagagagataattagaattaatttggctgtaaacacaaaggtattagtacaagatattgatgcagaaagtaataatttttataatttttaaattatgttttaaaattaactatcacatacttaccgtaagtttaaagtagtttgatttcttgcctttatatatcttctggcaaggac

SEQ ID NO: 8940 - DNA, 230 bp, synthetic construct; identical to SEQ ID NO: 8939
  misc_feature 1..230: note = promoter
  source 1..230: mol_type = other DNA

SEQ ID NO: 8941 - DNA, 230 bp, synthetic construct
  misc_feature 1..230: note = promoter
  source 1..230: mol_type = other DNA
gagggcctatttcccatgagtccttcatatttgcatataccatgcaaaaatattagagagataattagaattaatttggctgtaaacacaaaggtattagtacaagatattgatgcagaaagtaataatttctataatttttaaattatgttttaaaattaactatcacatacttaccgtaagtttaaagtagtttgatttcttgcctttatatatcttctggcaaggac

SEQ ID NO: 8942 - DNA, 230 bp, synthetic construct; identical to SEQ ID NO: 8941
  misc_feature 1..230: note = promoter
  source 1..230: mol_type = other DNA

SEQ ID NO: 8943 - DNA, 230 bp, synthetic construct
  misc_feature 1..230: note = promoter
  source 1..230: mol_type = other DNA
gagggcctatttcccatgagtccttcatatttgcatataccatgcaaaaatattagagagataattagaattaatttggctgtaaacacaaaggtattagtacaagatattgatgcagaaagtaataatttctctaatttttaaattatgttttaaaattaactatcacatacttaccgtaagtttaaagtagtttgatttcttgcctttatatatcttctggcaaggac

SEQ ID NO: 8944 - DNA, 230 bp, synthetic construct
  misc_feature 1..230: note = promoter
  source 1..230: mol_type = other DNA
gagggcctatttcccatgagtccttcatatttgcatataccatgcaaaaatattagagagataattagaattaatttggctgtaaacacaaaggtattagtacaagatattgatgcagaaagtaataatttctcgaatttttaaattatgttttaaaattaactatcacatacttaccgtaagtttaaagtagtttgatttcttgcctttatatatcttctggcaaggac

SEQ ID NO: 8945 - DNA, 230 bp, synthetic construct
  misc_feature 1..230: note = promoter
  source 1..230: mol_type = other DNA
gagggcctatttcccatgagtccttcatatttgcatataccatgcaaaaatattagagagataattagaattaatttggctgtaaacacaaaggtattagtacaagatattgatgcagaaagtaataatttctcggatttttaaattatgttttaaaattaactatcacatacttaccgtaagtttaaagtagtttgatttcttgcctttatatatcttctggcaaggac

SEQ ID NO: 8946 - DNA, 230 bp, synthetic construct
  misc_feature 1..230: note = promoter
  source 1..230: mol_type = other DNA
gagggcctatttcccatgagtccttcatatttgcatataccatgcaaaaatattagagagataattagaattaatttggctgtaaacacaaaggtattagtacaagatattgatgcagaaagtaataatttctcgggtttttaaattatgttttaaaattaactatcacatacttaccgtaagtttaaagtagtttgatttcttgcctttatatatcttctggcaaggac

SEQ ID NO: 8947 - DNA, 230 bp, synthetic construct; identical to SEQ ID NO: 8946
  misc_feature 1..230: note = promoter
  source 1..230: mol_type = other DNA

SEQ ID NO: 8948 - DNA, 230 bp, synthetic construct
  misc_feature 1..230: note = promoter
  source 1..230: mol_type = other DNA
gagggcctatttcccatgagtccttcatatttgcatataccatgcaaaaatattagagagataattagaattaatttggctgtaaacacaaaggtattagtacaagatattgatgcagaaagtaataatttctcgggtatttaaattatgttttaaaattaactatcacatacttaccgtaagtttaaagtagtttgatttcttgcctttatatatcttctggcaaggac

SEQ ID NO: 8949 - DNA, 230 bp, synthetic construct
  misc_feature 1..230: note = promoter
  source 1..230: mol_type = other DNA
gagggcctatttcccatgagtccttcatatttgcatataccatgcaaaaatattagagagataattagaattaatttggctgtaaacacaaaggtattagtacaagatattgatgcagaaagtaataatttctcgggtagttaaattatgttttaaaattaactatcacatacttaccgtaagtttaaagtagtttgatttcttgcctttatatatcttctggcaaggac

SEQ ID NO: 8950 - DNA, 230 bp, synthetic construct; identical to SEQ ID NO: 8949
  misc_feature 1..230: note = promoter
  source 1..230: mol_type = other DNA

SEQ ID NO: 8951 - DNA, 230 bp, synthetic construct; identical to SEQ ID NO: 8949
  misc_feature 1..230: note = promoter
  source 1..230: mol_type = other DNA

SEQ ID NO: 8952 - DNA, 230 bp, synthetic construct
  misc_feature 1..230: note = promoter
  source 1..230: mol_type = other DNA
gagggcctatttcccatgagtccttcatatttgcatataccatgcaaaaatattagagagataattagaattaatttggctgtaaacacaaaggtattagtacaagatattgatgcagaaagtaataatttctcgggtagtttaattatgttttaaaattaactatcacatacttaccgtaagtttaaagtagtttgatttcttgcctttatatatcttctggcaaggac

SEQ ID NO: 8953 - DNA, 230 bp, synthetic construct; identical to SEQ ID NO: 8952
  misc_feature 1..230: note = promoter
  source 1..230: mol_type = other DNA

SEQ ID NO: 8954 - DNA, 230 bp, synthetic construct
  misc_feature 1..230: note = promoter
  source 1..230: mol_type = other DNA
gagggcctatttcccatgagtccttcatatttgcatataccatgcaaaaatattagagagataattagaattaatttggctgtaaacacaaaggtattagtacaagatattgatgcagaaagtaataatttctcgggtagtttatttatgttttaaaattaactatcacatacttaccgtaagtttaaagtagtttgatttcttgcctttatatatcttctggcaaggac

SEQ ID NO: 8955 - DNA, 230 bp, synthetic construct
  misc_feature 1..230: note = promoter
  source 1..230: mol_type = other DNA
gagggcctatttcccatgagtccttcatatttgcatataccatgcaaaaatattagagagataattagaattaatttggctgtaaacacaaaggtattagtacaagatattgatgcagaaagtaataatttctcgggtagtttatatatgttttaaaattaactatcacatacttaccgtaagtttaaagtagtttgatttcttgcctttatatatcttctggcaaggac

SEQ ID NO: 8956 - DNA, 230 bp, synthetic construct
  misc_feature 1..230: note = promoter
  source 1..230: mol_type = other DNA
gagggcctatttcccatgagtccttcatatttgcatataccatgcaaaaatattagagagataattagaattaatttggctgtaaacacaaaggtattagtacaagatattgatgcagaaagtaataatttctcgggtagtttataaatgttttaaaattaactatcacatacttaccgtaagtttaaagtagtttgatttcttgcctttatatatcttctggcaaggac

SEQ ID NO: 8957 - DNA, 230 bp, synthetic construct
  misc_feature 1..230: note = promoter
  source 1..230: mol_type = other DNA
gagggcctatttcccatgagtccttcatatttgcatataccatgcaaaaatattagagagataattagaattaatttggctgtaaacacaaaggtattagtacaagatattgatgcagaaagtaataatttctcgggtagtttataattgttttaaaattaactatcacatacttaccgtaagtttaaagtagtttgatttcttgcctttatatatcttctggcaaggac

SEQ ID NO: 8958 - DNA, 230 bp, synthetic construct; identical to SEQ ID NO: 8957
  misc_feature 1..230: note = promoter
  source 1..230: mol_type = other DNA

SEQ ID NO: 8959 - DNA, 230 bp, synthetic construct
  misc_feature 1..230: note = promoter
  source 1..230: mol_type = other DNA
gagggcctatttcccatgagtccttcatatttgcatataccatgcaaaaatattagagagataattagaattaatttggctgtaaacacaaaggtattagtacaagatattgatgcagaaagtaataatttctcgggtagtttataatttttttaaaattaactatcacatacttaccgtaagtttaaagtagtttgatttcttgcctttatatatcttctggcaaggac

SEQ ID NO: 8960 - DNA, 230 bp, synthetic construct; identical to SEQ ID NO: 8959
  misc_feature 1..230: note = promoter
  source 1..230: mol_type = other DNA

SEQ ID NO: 8961 - DNA, 230 bp, synthetic construct; identical to SEQ ID NO: 8959
  misc_feature 1..230: note = promoter
  source 1..230: mol_type = other DNA

SEQ ID NO: 8962 - DNA, 230 bp, synthetic construct
  misc_feature 1..230: note = promoter
  source 1..230: mol_type = other DNA
gagggcctatttcccatgagtccttcatatttgcatataccatgcaaaaatattagagagataattagaattaatttggctgtaaacacaaaggtattagtacaagatattgatgcagaaagtaataatttctcgggtagtttataatttttataaaattaactatcacatacttaccgtaagtttaaagtagtttgatttcttgcctttatatatcttctggcaaggac

SEQ ID NO: 8963 - DNA, 230 bp, synthetic construct
  misc_feature 1..230: note = promoter
  source 1..230: mol_type = other DNA
gagggcctatttcccatgagtccttcatatttgcatataccatgcaaaaatattagagagataattagaattaatttggctgtaaacacaaaggtattagtacaagatattgatgcagaaagtaataatttctcgggtagtttataatttttaaaaaattaactatcacatacttaccgtaagtttaaagtagtttgatttcttgcctttatatatcttctggcaaggac

SEQ ID NO: 8964 - DNA, 230 bp, synthetic construct; identical to SEQ ID NO: 8963
  misc_feature 1..230: note = promoter
  source 1..230: mol_type = other DNA

SEQ ID NO: 8965 - DNA, 230 bp, synthetic construct
  misc_feature 1..230: note = promoter
  source 1..230: mol_type = other DNA
gagggcctatttcccatgagtccttcatatttgcatataccatgcaaaaatattagagagataattagaattaatttggctgtaaacacaaaggtattagtacaagatattgatgcagaaagtaataatttctcgggtagtttataatttttaaataattaactatcacatacttaccgtaagtttaaagtagtttgatttcttgcctttatatatcttctggcaaggac

SEQ ID NO: 8966 - DNA, 230 bp, synthetic construct
  misc_feature 1..230: note = promoter
  source 1..230: mol_type = other DNA
gagggcctatttcccatgagtccttcatatttgcatataccatgcaaaaatattagagagataattagaattaatttggctgtaaacacaaaggtattagtacaagatattgatgcagaaagtaataatttctcgggtagtttataatttttaaattattaactatcacatacttaccgtaagtttaaagtagtttgatttcttgcctttatatatcttctggcaaggac

SEQ ID NO: 8967 - DNA, 230 bp, synthetic construct; identical to SEQ ID NO: 8966
  misc_feature 1..230: note = promoter
  source 1..230: mol_type = other DNA

SEQ ID NO: 8968 - DNA, 230 bp, synthetic construct; identical to SEQ ID NO: 8966
  misc_feature 1..230: note = promoter
  source 1..230: mol_type = other DNA

SEQ ID NO: 8969 - DNA, 230 bp, synthetic construct
  misc_feature 1..230: note = promoter
  source 1..230: mol_type = other DNA
gagggcctatttcccatgagtccttcatatttgcatataccatgcaaaaatattagagagataattagaattaatttggctgtaaacacaaaggtattagtacaagatattgatgcagaaagtaataatttctcgggtagtttataatttttaaattatgaactatcacatacttaccgtaagtttaaagtagtttgatttcttgcctttatatatcttctggcaaggac

SEQ ID NO: 8970 - DNA, 230 bp, synthetic construct
  misc_feature 1..230: note = promoter
  source 1..230: mol_type = other DNA
gagggcctatttcccatgagtccttcatatttgcatataccatgcaaaaatattagagagataattagaattaatttggctgtaaacacaaaggtattagtacaagatattgatgcagaaagtaataatttctcgggtagtttataatttttaaattatgtactatcacatacttaccgtaagtttaaagtagtttgatttcttgcctttatatatcttctggcaaggac

SEQ ID NO: 8971 - DNA, 230 bp, synthetic construct
  misc_feature 1..230: note = promoter
  source 1..230: mol_type = other DNA
gagggcctatttcccatgagtccttcatatttgcatataccatgcaaaaatattagagagataattagaattaatttggctgtaaacacaaaggtattagtacaagatattgatgcagaaagtaataatttctcgggtagtttataatttttaaattatgttctatcacatacttaccgtaagtttaaagtagtttgatttcttgcctttatatatcttctggcaaggac

SEQ ID NO: 8972 - DNA, 230 bp, synthetic construct
  misc_feature 1..230: note = promoter
  source 1..230: mol_type = other DNA
gagggcctatttcccatgagtccttcatatttgcatataccatgcaaaaatattagagagataattagaattaatttggctgtaaacacaaaggtattagtacaagatattgatgcagaaagtaataatttctcgggtagtttataatttttaaattatgttttatcacatacttaccgtaagtttaaagtagtttgatttcttgcctttatatatcttctggcaaggac

SEQ ID NO: 8973 - DNA, 230 bp, synthetic construct; identical to SEQ ID NO: 8972
  misc_feature 1..230: note = promoter
  source 1..230: mol_type = other DNA

SEQ ID NO: 8974 - DNA, 230 bp, synthetic construct; identical to SEQ ID NO: 8972
  misc_feature 1..230: note = promoter
  source 1..230: mol_type = other DNA

SEQ ID NO: 8975 - DNA, 230 bp, synthetic construct
  misc_feature 1..230: note = promoter
  source 1..230: mol_type = other DNA
gagggcctatttcccatgagtccttcatatttgcatataccatgcaaaaatattagagagataattagaattaatttggctgtaaacacaaaggtattagtacaagatattgatgcagaaagtaataatttctcgggtagtttataatttttaaattatgttttaacacatacttaccgtaagtttaaagtagtttgatttcttgcctttatatatcttctggcaaggac

SEQ ID NO: 8976 - DNA, 230 bp, synthetic construct
  misc_feature 1..230: note = promoter
  source 1..230: mol_type = other DNA
gagggcctatttcccatgagtccttcatatttgcatataccatgcaaaaatattagagagataattagaattaatttggctgtaaacacaaaggtattagtacaagatattgatgcagaaagtaataatttctcgggtagtttataatttttaaattatgttttaaaacatacttaccgtaagtttaaagtagtttgatttcttgcctttatatatcttctggcaaggac

SEQ ID NO: 8977 - DNA, 230 bp, synthetic construct; identical to SEQ ID NO: 8976
  misc_feature 1..230: note = promoter
  source 1..230: mol_type = other DNA

SEQ ID NO: 8978 - DNA, 230 bp, synthetic construct
  misc_feature 1..230: note = promoter
  source 1..230: mol_type = other DNA
gagggcctatttcccatgagtccttcatatttgcatataccatgcaaaaatattagagagataattagaattaatttggctgtaaacacaaaggtattagtacaagatattgatgcagaaagtaataatttctcgggtagtttataatttttaaattatgttttaaaatatacttaccgtaagtttaaagtagtttgatttcttgcctttatatatcttctggcaaggac

SEQ ID NO: 8979 - DNA, 230 bp, synthetic construct
  misc_feature 1..230: note = promoter
  source 1..230: mol_type = other DNA
gagggcctatttcccatgagtccttcatatttgcatataccatgcaaaaatattagagagataattagaattaatttggctgtaaacacaaaggtattagtacaagatattgatgcagaaagtaataatttctcgggtagtttataatttttaaattatgttttaaaatttacttaccgtaagtttaaagtagtttgatttcttgcctttatatatcttctggcaaggac

SEQ ID NO: 8980 - DNA, 230 bp, synthetic construct
  misc_feature 1..230: note = promoter
  source 1..230: mol_type = other DNA
gagggcctatttcccatgagtccttcatatttgcatataccatgcaaaaatattagagagataattagaattaatttggctgtaaacacaaaggtattagtacaagatattgatgcagaaagtaataatttctcgggtagtttataatttttaaattatgttttaaaattaacttaccgtaagtttaaagtagtttgatttcttgcctttatatatcttctggcaaggac

SEQ ID NO: 8981 - DNA, 230 bp, synthetic construct; identical to SEQ ID NO: 8980
  misc_feature 1..230: note = promoter
  source 1..230: mol_type = other DNA

SEQ ID NO: 8982 - DNA, 230 bp, synthetic construct; identical to SEQ ID NO: 8980
  misc_feature 1..230: note = promoter
  source 1..230: mol_type = other DNA

SEQ ID NO: 8983 - DNA, 230 bp, synthetic construct; identical to SEQ ID NO: 8980
  misc_feature 1..230: note = promoter
  source 1..230: mol_type = other DNA

SEQ ID NO: 8984 - DNA, 230 bp, synthetic construct
  misc_feature 1..230: note = promoter
  source 1..230: mol_type = other DNA
gagggcctatttcccatgagtccttcatatttgcatataccatgcaaaaatattagagagataattagaattaatttggctgtaaacacaaaggtattagtacaagatattgatgcagaaagtaataatttctcgggtagtttataatttttaaattatgttttaaaattaactaaccgtaagtttaaagtagtttgatttcttgcctttatatatcttctggcaaggac

SEQ ID NO: 8985 - DNA, 230 bp, synthetic construct
  misc_feature 1..230: note = promoter
  source 1..230: mol_type = other DNA
gagggcctatttcccatgagtccttcatatttgcatataccatgcaaaaatattagagagataattagaattaatttggctgtaaacacaaaggtattagtacaagatattgatgcagaaagtaataatttctcgggtagtttataatttttaaattatgttttaaaattaactatccgtaagtttaaagtagtttgatttcttgcctttatatatcttctggcaaggac

SEQ ID NO: 8986 - DNA, 230 bp, synthetic construct; identical to SEQ ID NO: 8985
  misc_feature 1..230: note = promoter
  source 1..230: mol_type = other DNA

SEQ ID NO: 8987 - DNA, 230 bp, synthetic construct
  misc_feature 1..230: note = promoter
  source 1..230: mol_type = other DNA
gagggcctatttcccatgagtccttcatatttgcatataccatgcaaaaatattagagagataattagaattaatttggctgtaaacacaaaggtattagtacaagatattgatgcagaaagtaataatttctcgggtagtttataatttttaaattatgttttaaaattaactatcagtaagtttaaagtagtttgatttcttgcctttatatatcttctggcaaggac

SEQ ID NO: 8988 - DNA, 230 bp, synthetic construct
  misc_feature 1..230: note = promoter
  source 1..230: mol_type = other DNA
gagggcctatttcccatgagtccttcatatttgcatataccatgcaaaaatattagagagataattagaattaatttggctgtaaacacaaaggtattagtacaagatattgatgcagaaagtaataatttctcgggtagtttataatttttaaattatgttttaaaattaactatcactaagtttaaagtagtttgatttcttgcctttatatatcttctggcaaggac

SEQ ID NO: 8989 - DNA, 230 bp, synthetic construct
  misc_feature 1..230: note = promoter
  source 1..230: mol_type = other DNA
gagggcctatttcccatgagtccttcatatttgcatataccatgcaaaaatattagagagataattagaattaatttggctgtaaacacaaaggtattagtacaagatattgatgcagaaagtaataatttctcgggtagtttataatttttaaattatgttttaaaattaactatcacaaagtttaaagtagtttgatttcttgcctttatatatcttctggcaaggac

SEQ ID NO: 8990 - DNA, 230 bp, synthetic construct
  misc_feature 1..230: note = promoter
  source 1..230: mol_type = other DNA
gagggcctatttcccatgagtccttcatatttgcatataccatgcaaaaatattagagagataattagaattaatttggctgtaaacacaaaggtattagtacaagatattgatgcagaaagtaataatttctcgggtagtttataatttttaaattatgttttaaaattaactatcacatagtttaaagtagtttgatttcttgcctttatatatcttctggcaaggac

SEQ ID NO: 8991 - DNA, 230 bp, synthetic construct; identical to SEQ ID NO: 8990
  misc_feature 1..230: note = promoter
  source 1..230: mol_type = other DNA

SEQ ID NO: 8992 - DNA, 230 bp, synthetic construct
  misc_feature 1..230: note = promoter
  source 1..230: mol_type = other DNA
gagggcctatttcccatgagtccttcatatttgcatataccatgcaaaaatattagagagataattagaattaatttggctgtaaacacaaaggtattagtacaagatattgatgcagaaagtaataatttctcgggtagtttataatttttaaattatgttttaaaattaactatcacatactttaaagtagtttgatttcttgcctttatatatcttctggcaaggac

SEQ ID NO: 8993 - DNA, 230 bp, synthetic construct; identical to SEQ ID NO: 8992
  misc_feature 1..230: note = promoter
  source 1..230: mol_type = other DNA

SEQ ID NO: 8994 - DNA, 230 bp, synthetic construct; identical to SEQ ID NO: 8992
  misc_feature 1..230: note = promoter
  source 1..230: mol_type = other DNA

SEQ ID NO: 8995 - DNA, 230 bp, synthetic construct
  misc_feature 1..230: note = promoter
  source 1..230: mol_type = other DNA
gagggcctatttcccatgagtccttcatatttgcatataccatgcaaaaatattagagagataattagaattaatttggctgtaaacacaaaggtattagtacaagatattgatgcagaaagtaataatttctcgggtagtttataatttttaaattatgttttaaaattaactatcacatacttaaaagtagtttgatttcttgcctttatatatcttctggcaaggac

SEQ ID NO: 8996 - DNA, 230 bp, synthetic construct
  misc_feature 1..230: note = promoter
  source 1..230: mol_type = other DNA
gagggcctatttcccatgagtccttcatatttgcatataccatgcaaaaatattagagagataattagaattaatttggctgtaaacacaaaggtattagtacaagatattgatgcagaaagtaataatttctcgggtagtttataatttttaaattatgttttaaaattaactatcacatacttacaagtagtttgatttcttgcctttatatatcttctggcaaggac

SEQ ID NO: 8997 - DNA, 230 bp, synthetic construct
  misc_feature 1..230: note = promoter
  source 1..230: mol_type = other DNA
gagggcctatttcccatgagtccttcatatttgcatataccatgcaaaaatattagagagataattagaattaatttggctgtaaacacaaaggtattagtacaagatattgatgcagaaagtaataatttctcgggtagtttataatttttaaattatgttttaaaattaactatcacatacttaccagtagtttgatttcttgcctttatatatcttctggcaaggac

SEQ ID NO: 8998 - DNA, 230 bp, synthetic construct
  misc_feature 1..230: note = promoter
  source 1..230: mol_type = other DNA
gagggcctatttcccatgagtccttcatatttgcatataccatgcaaaaatattagagagataattagaattaatttggctgtaaacacaaaggtattagtacaagatattgatgcagaaagtaataatttctcgggtagtttataatttttaaattatgttttaaaattaactatcacatacttaccggtagtttgatttcttgcctttatatatcttctggcaaggac

SEQ ID NO: 8999 - DNA, 230 bp, synthetic construct
  misc_feature 1..230: note = promoter
  source 1..230: mol_type = other DNA
gagggcctatttcccatgagtccttcatatttgcatataccatgcaaaaatattagagagataattagaattaatttggctgtaaacacaaaggtattagtacaagatattgatgcagaaagtaataatttctcgggtagtttataatttttaaattatgttttaaaattaactatcacatacttaccgttagtttgatttcttgcctttatatatcttctggcaaggac

SEQ ID NO: 9000 - DNA, 230 bp, synthetic construct
  misc_feature 1..230: note = promoter
  source 1..230: mol_type = other DNA
gagggcctatttcccatgagtccttcatatttgcatataccatgcaaaaatattagagagataattagaattaatttggctgtaaacacaaaggtattagtacaagatattgatgcagaaagtaataatttctcgggtagtttataatttttaaattatgttttaaaattaactatcacatacttaccgtaagtttgatttcttgcctttatatatcttctggcaaggac

SEQ ID NO: 9001 - DNA, 230 bp, synthetic construct; identical to SEQ ID NO: 9000
  misc_feature 1..230: note = promoter
  source 1..230: mol_type = other DNA

SEQ ID NO: 9002 - DNA, 230 bp, synthetic construct; identical to SEQ ID NO: 9000
  misc_feature 1..230: note = promoter
  source 1..230: mol_type = other DNA

SEQ ID NO: 9003 - DNA, 230 bp, synthetic construct; identical to SEQ ID NO: 9000
  misc_feature 1..230: note = promoter
  source 1..230: mol_type = other DNA

SEQ ID NO: 9004 - DNA, 230 bp, synthetic construct; identical to SEQ ID NO: 9000
  misc_feature 1..230: note = promoter
  source 1..230: mol_type = other DNA

SEQ ID NO: 9005 - DNA, 230 bp, synthetic construct; identical to SEQ ID NO: 9000
  misc_feature 1..230: note = promoter
  source 1..230: mol_type = other DNA

SEQ ID NO: 9006 - DNA, 230 bp, synthetic construct
  misc_feature 1..230: note = promoter
  source 1..230: mol_type = other DNA
gagggcctatttcccatgagtccttcatatttgcatataccatgcaaaaatattagagagataattagaattaatttggctgtaaacacaaaggtattagtacaagatattgatgcagaaagtaataatttctcgggtagtttataatttttaaattatgttttaaaattaactatcacatacttaccgtaagtttaatttcttgcctttatatatcttctggcaaggac

SEQ ID NO: 9007 - DNA, 230 bp, synthetic construct; identical to SEQ ID NO: 9006
  misc_feature 1..230: note = promoter
  source 1..230: mol_type = other DNA

SEQ ID NO: 9008 - DNA, 230 bp, synthetic construct
  misc_feature 1..230: note = promoter
  source 1..230: mol_type = other DNA
gagggcctatttcccatgagtccttcatatttgcatataccatgcaaaaatattagagagataattagaattaatttggctgtaaacacaaaggtattagtacaagatattgatgcagaaagtaataatttctcgggtagtttataatttttaaattatgttttaaaattaactatcacatacttaccgtaagtttaaattcttgcctttatatatcttctggcaaggac

SEQ ID NO: 9009 - DNA, 230 bp, synthetic construct
  misc_feature 1..230: note = promoter
  source 1..230: mol_type = other DNA
gagggcctatttcccatgagtccttcatatttgcatataccatgcaaaaatattagagagataattagaattaatttggctgtaaacacaaaggtattagtacaagatattgatgcagaaagtaataatttctcgggtagtttataatttttaaattatgttttaaaattaactatcacatacttaccgtaagtttaaagtcttgcctttatatatcttctggcaaggac

SEQ ID NO: 9010 - DNA, 230 bp, synthetic construct; identical to SEQ ID NO: 9009
  misc_feature 1..230: note = promoter
  source 1..230: mol_type = other DNA

SEQ ID NO: 9011 - DNA, 230 bp, synthetic construct
  misc_feature 1..230: note = promoter
  source 1..230: mol_type = other DNA
gagggcctatttcccatgagtccttcatatttgcatataccatgcaaaaatattagagagataattagaattaatttggctgtaaacacaaaggtattagtacaagatattgatgcagaaagtaataatttctcgggtagtttataatttttaaattatgttttaaaattaactatcacatacttaccgtaagtttaaagtattgcctttatatatcttctggcaaggac

SEQ ID NO: 9012 - DNA, 230 bp, synthetic construct
  misc_feature 1..230: note = promoter
  source 1..230: mol_type = other DNA
gagggcctatttcccatgagtccttcatatttgcatataccatgcaaaaatattagagagataattagaattaatttggctgtaaacacaaaggtattagtacaagatattgatgcagaaagtaataatttctcgggtagtttataatttttaaattatgttttaaaattaactatcacatacttaccgtaagtttaaagtagtgcctttatatatcttctggcaaggac

SEQ ID NO: 9013 - DNA, 230 bp, synthetic construct; identical to SEQ ID NO: 9012
  misc_feature 1..230: note = promoter
  source 1..230: mol_type = other DNA

SEQ ID NO: 9014 - DNA, 230 bp, synthetic construct
  misc_feature 1..230: note = promoter
  source 1..230: mol_type = other DNA
gagggcctatttcccatgagtccttcatatttgcatataccatgcaaaaatattagagagataattagaattaatttggctgtaaacacaaaggtattagtacaagatattgatgcagaaagtaataatttctcgggtagtttataatttttaaattatgttttaaaattaactatcacatacttaccgtaagtttaaagtagttcctttatatatcttctggcaaggac

SEQ ID NO: 9015 - DNA, 230 bp, synthetic construct
  misc_feature 1..230: note = promoter
  source 1..230: mol_type = other DNA
gagggcctatttcccatgagtccttcatatttgcatataccatgcaaaaatattagagagataattagaattaatttggctgtaaacacaaaggtattagtacaagatattgatgcagaaagtaataatttctcgggtagtttataatttttaaattatgttttaaaattaactatcacatacttaccgtaagtttaaagtagtttctttatatatcttctggcaaggac

SEQ ID NO: 9016 - DNA, 230 bp, synthetic construct
  misc_feature 1..230: note = promoter
  source 1..230: mol_type = other DNA
gagggcctatttcccatgagtccttcatatttgcatataccatgcaaaaatattagagagataattagaattaatttggctgtaaacacaaaggtattagtacaagatattgatgcagaaagtaataatttctcgggtagtttataatttttaaattatgttttaaaattaactatcacatacttaccgtaagtttaaagtagtttgtttatatatcttctggcaaggac

SEQ ID NO: 9017 - DNA, 230 bp, synthetic construct
  misc_feature 1..230: note = promoter
  source 1..230: mol_type = other DNA
gagggcctatttcccatgagtccttcatatttgcatataccatgcaaaaatattagagagataattagaattaatttggctgtaaacacaaaggtattagtacaagatattgatgcagaaagtaataatttctcgggtagtttataatttttaaattatgttttaaaattaactatcacatacttaccgtaagtttaaagtagtttgattatatatcttctggcaaggac

SEQ ID NO: 9018 - DNA, 230 bp, synthetic construct; identical to SEQ ID NO: 9017
  misc_feature 1..230: note = promoter
  source 1..230: mol_type = other DNA

SEQ ID NO: 9019 - DNA, 230 bp, synthetic construct; identical to SEQ ID NO: 9017
  misc_feature 1..230: note = promoter
  source 1..230: mol_type = other DNA

SEQ ID NO: 9020 - DNA, 230 bp, synthetic construct
  misc_feature 1..230: note = promoter
  source 1..230: mol_type = other DNA
gagggcctatttcccatgagtccttcatatttgcatataccatgcaaaaatattagagagataattagaattaatttggctgtaaacacaaaggtattagtacaagatattgatgcagaaagtaataatttctcgggtagtttataatttttaaattatgttttaaaattaactatcacatacttaccgtaagtttaaagtagtttgattttatatcttctggcaaggac

SEQ ID NO: 9021 - DNA, 230 bp, synthetic construct
  misc_feature 1..230: note = promoter
  source 1..230: mol_type = other DNA
gagggcctatttcccatgagtccttcatatttgcatataccatgcaaaaatattagagagataattagaattaatttggctgtaaacacaaaggtattagtacaagatattgatgcagaaagtaataatttctcgggtagtttataatttttaaattatgttttaaaattaactatcacatacttaccgtaagtttaaagtagtttgatttcatatcttctggcaaggac

SEQ ID NO: 9022 - DNA, 230 bp, synthetic construct
  misc_feature 1..230: note = promoter
  source 1..230: mol_type = other DNA
gagggcctatttcccatgagtccttcatatttgcatataccatgcaaaaatattagagagataattagaattaatttggctgtaaacacaaaggtattagtacaagatattgatgcagaaagtaataatttctcgggtagtttataatttttaaattatgttttaaaattaactatcacatacttaccgtaagtttaaagtagtttgatttcttatcttctggcaaggac

SEQ ID NO: 9023 - DNA, 230 bp, synthetic construct; identical to SEQ ID NO: 9022
  misc_feature 1..230: note = promoter
  source 1..230: mol_type = other DNA

SEQ ID NO: 9024 - DNA, 230 bp, synthetic construct
  misc_feature 1..230: note = promoter
  source 1..230: mol_type = other DNA
gagggcctatttcccatgagtccttcatatttgcatataccatgcaaaaatattagagagataattagaattaatttggctgtaaacacaaaggtattagtacaagatattgatgcagaaagtaataatttctcgggtagtttataatttttaaattatgttttaaaattaactatcacatacttaccgtaagtttaaagtagtttgatttcttgtcttctggcaaggac

SEQ ID NO: 9025 - DNA, 230 bp, synthetic construct
  misc_feature 1..230: note = promoter
  source 1..230: mol_type = other DNA
gagggcctatttcccatgagtccttcatatttgcatataccatgcaaaaatattagagagataattagaattaatttggctgtaaacacaaaggtattagtacaagatattgatgcagaaagtaataatttctcgggtagtttataatttttaaattatgttttaaaattaactatcacatacttaccgtaagtttaaagtagtttgatttcttgccttctggcaaggac

SEQ ID NO: 9026 - DNA, 230 bp, synthetic construct; identical to SEQ ID NO: 9025
  misc_feature 1..230: note = promoter
  source 1..230: mol_type = other DNA

SEQ ID NO: 9027 - DNA, 230 bp, synthetic construct; identical to SEQ ID NO: 9025
  misc_feature 1..230: note = promoter
  source 1..230: mol_type = other DNA

SEQ ID NO: 9028 - DNA, 230 bp, synthetic construct; identical to SEQ ID NO: 9025
  misc_feature 1..230: note = promoter
  source 1..230: mol_type = other DNA

SEQ ID NO: 9029 - DNA, 230 bp, synthetic construct
  misc_feature 1..230: note = promoter
  source 1..230: mol_type = other DNA
gagggcctatttcccatgagtccttcatatttgcatataccatgcaaaaatattagagagataattagaattaatttggctgtaaacacaaaggtattagtacaagatattgatgcagaaagtaataatttctcgggtagtttataatttttaaattatgttttaaaattaactatcacatacttaccgtaagtttaaagtagtttgatttcttgccttttggcaaggac

SEQ ID NO: 9030 - DNA, 230 bp, synthetic construct
  misc_feature 1..230: note = promoter
  source 1..230: mol_type = other DNA
gagggcctatttcccatgagtccttcatatttgcatataccatgcaaaaatattagagagataattagaattaatttggctgtaaacacaaaggtattagtacaagatattgatgcagaaagtaataatttctcgggtagtttataatttttaaattatgttttaaaattaactatcacatacttaccgtaagtttaaagtagtttgatttcttgcctttaggcaaggac

SEQ ID NO: 9031 - DNA, 230 bp, synthetic construct
  misc_feature 1..230: note = promoter
  source 1..230: mol_type = other DNA
gagggcctatttcccatgagtccttcatatttgcatataccatgcaaaaatattagagagataattagaattaatttggctgtaaacacaaaggtattagtacaagatattgatgcagaaagtaataatttctcgggtagtttataatttttaaattatgttttaaaattaactatcacatacttaccgtaagtttaaagtagtttgatttcttgcctttatgcaaggac

SEQ ID NO: 9032 - DNA, 230 bp, synthetic construct
  misc_feature 1..230: note = promoter
  source 1..230: mol_type = other DNA
gagggcctatttcccatgagtccttcatatttgcatataccatgcaaaaatattagagagataattagaattaatttggctgtaaacacaaaggtattagtacaagatattgatgcagaaagtaataatttctcgggtagtttataatttttaaattatgttttaaaattaactatcacatacttaccgtaagtttaaagtagtttgatttcttgcctttatacaaggac

SEQ ID NO: 9033 - DNA, 230 bp, synthetic construct
  misc_feature 1..230: note = promoter
  source 1..230: mol_type = other DNA
gagggcctatttcccatgagtccttcatatttgcatataccatgcaaaaatattagagagataattagaattaatttggctgtaaacacaaaggtattagtacaagatattgatgcagaaagtaataatttctcgggtagtttataatttttaaattatgttttaaaattaactatcacatacttaccgtaagtttaaagtagtttgatttcttgcctttatataaggac

SEQ ID NO: 9034 - DNA, 230 bp, synthetic construct; identical to SEQ ID NO: 9033
  misc_feature 1..230: note = promoter
  source 1..230: mol_type = other DNA

SEQ ID NO: 9035 - DNA, 230 bp, synthetic construct
  misc_feature 1..230: note = promoter
  source 1..230: mol_type = other DNA
gagggcctatttcccatgagtccttcatatttgcatataccatgcaaaaatattagagagataattagaattaatttggctgtaaacacaaaggtattagtacaagatattgatgcagaaagtaataatttctcgggtagtttataatttttaaattatgttttaaaattaactatcacatacttaccgtaagtttaaagtagtttgatttcttgcctttatatatggac

SEQ ID NO: 9036 - DNA, 230 bp, synthetic construct
  misc_feature 1..230: note = promoter
  source 1..230: mol_type = other DNA
gagggcctatttcccatgagtccttcatatttgcatataccatgcaaaaatattagagagataattagaattaatttggctgtaaacacaaaggtattagtacaagatattgatgcagaaagtaataatttctcgggtagtttataatttttaaattatgttttaaaattaactatcacatacttaccgtaagtttaaagtagtttgatttcttgcctttatatatcgac

SEQ ID NO: 9037 - DNA, 230 bp, synthetic construct
  misc_feature 1..230: note = promoter
  source 1..230: mol_type = other DNA
gagggcctatttcccatgagtccttcatatttgcatataccatgcaaaaatattagagagataattagaattaatttggctgtaaacacaaaggtattagtacaagatattgatgcagaaagtaataatttctcgggtagtttataatttttaaattatgttttaaaattaactatcacatacttaccgtaagtttaaagtagtttgatttcttgcctttatatatctac

SEQ ID NO: 9038 - DNA, 230 bp, synthetic construct
  misc_feature 1..230: note = promoter
  source 1..230: mol_type = other DNA
gagggcctatttcccatgagtccttcatatttgcatataccatgcaaaaatattagagagataattagaattaatttggctgtaaacacaaaggtattagtacaagatattgatgcagaaagtaataatttctcgggtagtttataatttttaaattatgttttaaaattaactatcacatacttaccgtaagtttaaagtagtttgatttcttgcctttatatatcttc

SEQ ID NO: 9039 - DNA, 230 bp, synthetic construct; identical to SEQ ID NO: 9038
  misc_feature 1..230: note = promoter
  source 1..230: mol_type = other DNA

SEQ ID NO: 9040 - DNA, 231 bp, synthetic construct
  misc_feature 1..231: note = promoter
  source 1..231: mol_type = other DNA
gagggcctatttcccatgagtccttcatatttgcatataccatgcaaaaatattagagagataattagaattaatttggctgtaaacacaaaggtattagtacaagatattgatgcagaaagtaataatttctcgggtagtttataatttttaaattatgttttaaaattaactatcacatacttaccgtaagtttaaagtagtttgatttcttgcctttatatatcttct

SEQ ID NO: 9041 - DNA, 232 bp, synthetic construct
  misc_feature 1..232: note = promoter
  source 1..232: mol_type = other DNA
gagggcctatttcccatgagtccttcatatttgcatataccatgcaaaaatattagagagataattagaattaatttggctgtaaacacaaaggtattagtacaagatattgatgcagaaagtaataatttctcgggtagtttataatttttaaattatgttttaaaattaactatcacatacttaccgtaagtttaaagtagtttgatttcttgcctttatatatcttctg

SEQ ID NO: 9042 - DNA, 233 bp, synthetic construct
  misc_feature 1..233: note = promoter
  source 1..233: mol_type = other DNA
gagggcctatttcccatgagtccttcatatttgcatataccatgcaaaaatattagagagataattagaattaatttggctgtaaacacaaaggtattagtacaagatattgatgcagaaagtaataatttctcgggtagtttataatttttaaattatgttttaaaattaactatcacatacttaccgtaagtttaaagtagtttgatttcttgcctttatatatcttctgg

SEQ ID NO: 9043 - DNA, 234 bp, synthetic construct
  misc_feature 1..234: note = promoter
  source 1..234: mol_type = other DNA
gagggcctatttcccatgagtccttcatatttgcatataccatgcaaaaatattagagagataattagaattaatttggctgtaaacacaaaggtattagtacaagatattgatgcagaaagtaataatttctcgggtagtttataatttttaaattatgttttaaaattaactatcacatacttaccgtaagtttaaagtagtttgatttcttgcctttatatatcttctggc

SEQ ID NO: 9044 - DNA, 235 bp, synthetic construct
  misc_feature 1..235: note = promoter
  source 1..235: mol_type = other DNA
gagggcctatttcccatgagtccttcatatttgcatataccatgcaaaaatattagagagataattagaattaatttggctgtaaacacaaaggtattagtacaagatattgatgcagaaagtaataatttctcgggtagtttataatttttaaattatgttttaaaattaactatcacatacttaccgtaagtttaaagtagtttgatttcttgcctttatatatcttctggca

SEQ ID NO: 9045 - DNA, 236 bp, synthetic construct
  misc_feature 1..236: note = promoter
  source 1..236: mol_type = other DNA
gagggcctatttcccatgagtccttcatatttgcatataccatgcaaaaatattagagagataattagaattaatttggctgtaaacacaaaggtattagtacaagatattgatgcagaaagtaataatttctcgggtagtttataatttttaaattatgttttaaaattaactatcacatacttaccgtaagtttaaagtagtttgatttcttgcctttatatatcttctggcaa

SEQ ID NO: 9046 - DNA, 237 bp, synthetic construct
  misc_feature 1..237: note = promoter
  source 1..237: mol_type = other DNA
gagggcctatttcccatgagtccttcatatttgcatataccatgcaaaaatattagagagataattagaattaatttggctgtaaacacaaaggtattagtacaagatattgatgcagaaagtaataatttctcgggtagtttataatttttaaattatgttttaaaattaactatcacatacttaccgtaagtttaaagtagtttgatttcttgcctttatatatcttctggcaag

SEQ ID NO: 9047 - DNA, 238 bp, synthetic construct; identical to SEQ ID NO: 8807
  misc_feature 1..238: note = promoter
  source 1..238: mol_type = other DNA

SEQ ID NO: 9048 - DNA, 239 bp, synthetic construct; identical to SEQ ID NO: 8808
  misc_feature 1..239: note = promoter
  source 1..239: mol_type = other DNA

SEQ ID NO: 9049 - DNA, 103 bp, synthetic construct; identical to SEQ ID NO: 3566
  misc_feature 1..103: note = promoter
  source 1..103: mol_type = other DNA

SEQ ID NO: 9050 - DNA, 103 bp, synthetic construct
  misc_feature 1..103: note = promoter
  source 1..103: mol_type = other DNA
aagggcctatttcccatgattccttcatatttgcatatacgatagcttaccgtaacttgaaagtatttcgatttcttggctttatatatcttgtggaaaggac

SEQ ID NO: 9051 - DNA, 103 bp, synthetic construct
  misc_feature 1..103: note = promoter
  source 1..103: mol_type = other DNA
cagggcctatttcccatgattccttcatatttgcatatacgatagcttaccgtaacttgaaagtatttcgatttcttggctttatatatcttgtggaaaggac

SEQ ID NO: 9052 - DNA, 103 bp, synthetic construct
  misc_feature 1..103: note = promoter
  source 1..103: mol_type = other DNA
tagggcctatttcccatgattccttcatatttgcatatacgatagcttaccgtaacttgaaagtatttcgatttcttggctttatatatcttgtggaaaggac

SEQ ID NO: 9053 - DNA, 103 bp, synthetic construct
  misc_feature 1..103: note = promoter
  source 1..103: mol_type = other DNA
gcgggcctatttcccatgattccttcatatttgcatatacgatagcttaccgtaacttgaaagtatttcgatttcttggctttatatatcttgtggaaaggac

SEQ ID NO: 9054 - DNA, 103 bp, synthetic construct
  misc_feature 1..103: note = promoter
  source 1..103: mol_type = other DNA
gggggcctatttcccatgattccttcatatttgcatatacgatagcttaccgtaacttgaaagtatttcgatttcttggctttatatatcttgtggaaaggac

SEQ ID NO: 9055 - DNA, 103 bp, synthetic construct
  misc_feature 1..103: note = promoter
  source 1..103: mol_type = other DNA
gtgggcctatttcccatgattccttcatatttgcatatacgatagcttaccgtaacttgaaagtatttcgatttcttggctttatatatcttgtggaaaggac

SEQ ID NO: 9056 - DNA, 103 bp, synthetic construct
  misc_feature 1..103: note = promoter
  source 1..103: mol_type = other DNA
gaaggcctatttcccatgattccttcatatttgcatatacgatagcttaccgtaacttgaaagtatttcgatttcttggctttatatatcttgtggaaaggac

SEQ ID NO: 9057 - DNA, 103 bp, synthetic construct
  misc_feature 1..103: note = promoter
  source 1..103: mol_type = other DNA
gacggcctatttcccatgattccttcatatttgcatatacgatagcttaccgtaacttgaaagtatttcgatttcttggctttatatatcttgtggaaaggac

SEQ ID NO: 9058 - DNA, 103 bp, synthetic construct
  misc_feature 1..103: note = promoter
  source 1..103: mol_type = other DNA
gatggcctatttcccatgattccttcatatttgcatatacgatagcttaccgtaacttgaaagtatttcgatttcttggctttatatatcttgtggaaaggac

SEQ ID NO: 9059 - DNA, 103 bp, synthetic construct
  misc_feature 1..103: note = promoter
  source 1..103: mol_type = other DNA
gagagcctatttcccatgattccttcatatttgcatatacgatagcttaccgtaacttgaaagtatttcgatttcttggctttatatatcttgtggaaaggac

SEQ ID NO: 9060 - DNA, 103 bp, synthetic construct
  misc_feature 1..103: note = promoter
  source 1..103: mol_type = other DNA
gagcgcctatttcccatgattccttcatatttgcatatacgatagcttaccgtaacttgaaagtatttcgatttcttggctttatatatcttgtggaaaggac

SEQ ID NO: 9061 - DNA, 103 bp, synthetic construct
  misc_feature 1..103: note = promoter
  source 1..103: mol_type = other DNA
gagtgcctatttcccatgattccttcatatttgcatatacgatagcttaccgtaacttgaaagtatttcgatttcttggctttatatatcttgtggaaaggac

SEQ ID NO: 9062 - DNA, 103 bp, synthetic construct
  misc_feature 1..103: note = promoter
  source 1..103: mol_type = other DNA
gaggacctatttcccatgattccttcatatttgcatatacgatagcttaccgtaacttgaaagtatttcgatttcttggctttatatatcttgtggaaaggac

SEQ ID NO: 9063 - DNA, 103 bp, synthetic construct
  misc_feature 1..103: note = promoter
  source 1..103: mol_type = other DNA
gaggccctatttcccatgattccttcatatttgcatatacgatagcttaccgtaacttgaaagtatttcgatttcttggctttatatatcttgtggaaaggac

SEQ ID NO: 9064 - DNA, 103 bp, synthetic construct
  misc_feature 1..103: note = promoter
  source 1..103: mol_type = other DNA
gaggtcctatttcccatgattccttcatatttgcatatacgatagcttaccgtaacttgaaagtatttcgatttcttggctttatatatcttgtggaaaggac

SEQ ID NO: 9065 - DNA, 103 bp, synthetic construct
  misc_feature 1..103: note = promoter
  source 1..103: mol_type = other DNA
gagggactatttcccatgattccttcatatttgcatatacgatagcttaccgtaacttgaaagtatttcgatttcttggctttatatatcttgtggaaaggac

SEQ ID NO: 9066 - DNA, 103 bp, synthetic construct
  misc_feature 1..103: note = promoter
  source 1..103: mol_type = other DNA
gaggggctatttcccatgattccttcatatttgcatatacgatagcttaccgtaacttgaaagtatttcgatttcttggctttatatatcttgtggaaaggac

SEQ ID NO: 9067 - DNA, 103 bp, synthetic construct
  misc_feature 1..103: note = promoter
  source 1..103: mol_type = other DNA
gagggtctatttcccatgattccttcatatttgcatatacgatagcttaccgtaacttgaaagtatttcgatttcttggctttatatatcttgtggaaaggac

SEQ ID NO: 9068 - DNA, 103 bp, synthetic construct
  misc_feature 1..103: note = promoter
  source 1..103: mol_type = other DNA
gagggcatatttcccatgattccttcatatttgcatatacgatagcttaccgtaacttgaaagtatttcgatttcttggctttatatatcttgtggaaaggac

SEQ ID NO: 9069 - DNA, 103 bp, synthetic construct
  misc_feature 1..103: note = promoter
  source 1..103: mol_type = other DNA
gagggcgtatttcccatgattccttcatatttgcatatacgatagcttaccgtaacttgaaagtatttcgatttcttggctttatatatcttgtggaaaggac

SEQ ID NO: 9070 - DNA, 103 bp, synthetic construct
  misc_feature 1..103: note = promoter
  source 1..103: mol_type = other DNA
gagggcttatttcccatgattccttcatatttgcatatacgatagcttaccgtaacttgaaagtatttcgatttcttggctttatatatcttgtggaaaggac

SEQ ID NO: 9071 - DNA, 103 bp, synthetic construct
  misc_feature 1..103: note = promoter
  source 1..103: mol_type = other DNA
gagggccaatttcccatgattccttcatatttgcatatacgatagcttaccgtaacttgaaagtatttcgatttcttggctttatatatcttgtggaaaggac

SEQ ID NO: 9072 - DNA, 103 bp, synthetic construct
  misc_feature 1..103: note = promoter
  source 1..103: mol_type = other DNA
gagggcccatttcccatgattccttcatatttgcatatacgatagcttaccgtaacttgaaagtatttcgatttcttggctttatatatcttgtggaaaggac

SEQ ID NO: 9073 - DNA, 103 bp, synthetic construct
  misc_feature 1..103: note = promoter
  source 1..103: mol_type = other DNA
gagggccgatttcccatgattccttcatatttgcatatacgatagcttaccgtaacttgaaagtatttcgatttcttggctttatatatcttgtggaaaggac

SEQ ID NO: 9074 - DNA, 103 bp, synthetic construct
  misc_feature 1..103: note = promoter
  source 1..103: mol_type = other DNA
gagggcctctttcccatgattccttcatatttgcatatacgatagcttaccgtaacttgaaagtatttcgatttcttggctttatatatcttgtggaaaggac

SEQ ID NO: 9075 - DNA, 103 bp, synthetic construct
  misc_feature 1..103: note = promoter
  source 1..103: mol_type = other DNA
gagggcctgtttcccatgattccttcatatttgcatatacgatagcttaccgtaacttgaaagtatttcgatttcttggctttatatatcttgtggaaaggac

SEQ ID NO: 9076 - DNA, 103 bp, synthetic construct
  misc_feature 1..103: note = promoter
  source 1..103: mol_type = other DNA
gagggcctttttcccatgattccttcatatttgcatatacgatagcttaccgtaacttgaaagtatttcgatttcttggctttatatatcttgtggaaaggac

SEQ ID NO: 9077 - DNA, 103 bp, synthetic construct
  misc_feature 1..103: note = promoter
  source 1..103: mol_type = other DNA
gagggcctaattcccatgattccttcatatttgcatatacgatagcttaccgtaacttgaaagtatttcgatttcttggctttatatatcttgtggaaaggac

SEQ ID NO: 9078 - DNA, 103 bp, synthetic construct
  misc_feature 1..103: note = promoter
  source 1..103: mol_type = other DNA
gagggcctacttcccatgattccttcatatttgcatatacgatagcttaccgtaacttgaaagtatttcgatttcttggctttatatatcttgtggaaaggac

SEQ ID NO: 9079 - DNA, 103 bp, synthetic construct
  misc_feature 1..103: note = promoter
  source 1..103: mol_type = other DNA
gagggcctagttcccatgattccttcatatttgcatatacgatagcttaccgtaacttgaaagtatttcgatttcttggctttatatatcttgtggaaaggac

SEQ ID NO: 9080 - DNA, 103 bp, synthetic construct
  misc_feature 1..103: note = promoter
  source 1..103: mol_type = other DNA
gagggcctatatcccatgattccttcatatttgcatatacgatagcttaccgtaacttgaaagtatttcgatttcttggctttatatatcttgtggaaaggac

SEQ ID NO: 9081 - DNA, 103 bp, synthetic construct
  misc_feature 1..103: note = promoter
  source 1..103: mol_type = other DNA
gagggcctatctcccatgattccttcatatttgcatatacgatagcttaccgtaacttgaaagtatttcgatttcttggctttatatatcttgtggaaaggac

SEQ ID NO: 9082 - DNA, 103 bp, synthetic construct
  misc_feature 1..103: note = promoter
  source 1..103: mol_type = other DNA
gagggcctatgtcccatgattccttcatatttgcatatacgatagcttaccgtaacttgaaagtatttcgatttcttggctttatatatcttgtggaaaggac

SEQ ID NO: 9083 - DNA, 103 bp, synthetic construct
  misc_feature 1..103: note = promoter
  source 1..103: mol_type = other DNA
gagggcctattacccatgattccttcatatttgcatatacgatagcttaccgtaacttgaaagtatttcgatttcttggctttatatatcttgtggaaaggac

SEQ ID NO: 9084 - DNA, 103 bp, synthetic construct
  misc_feature 1..103: note = promoter
  source 1..103: mol_type = other DNA
gagggcctattccccatgattccttcatatttgcatatacgatagcttaccgtaacttgaaagtatttcgatttcttggctttatatatcttgtggaaaggac

SEQ ID NO: 9085 - DNA, 103 bp, synthetic construct
  misc_feature 1..103: note = promoter
  source 1..103: mol_type = other DNA
gagggcctattgcccatgattccttcatatttgcatatacgatagcttaccgtaacttgaaagtatttcgatttcttggctttatatatcttgtggaaaggac

SEQ ID NO: 9086 - DNA, 103 bp, synthetic construct
  misc_feature 1..103: note = promoter
  source 1..103: mol_type = other DNA
gagggcctatttaccatgattccttcatatttgcatatacgatagcttaccgtaacttgaaagtatttcgatttcttggctttatatatcttgtggaaaggac

SEQ ID NO: 9087 - DNA, 103 bp, synthetic construct
  misc_feature 1..103: note = promoter
  source 1..103: mol_type = other DNA
gagggcctatttgccatgattccttcatatttgcatatacgatagcttaccgtaacttgaaagtatttcgatttcttggctttatatatcttgtggaaaggac

SEQ ID NO: 9088 - DNA, 103 bp, synthetic construct
  misc_feature 1..103: note = promoter
  source 1..103: mol_type = other DNA
gagggcctattttccatgattccttcatatttgcatatacgatagcttaccgtaacttgaaagtatttcgatttcttggctttatatatcttgtggaaaggac

SEQ ID NO: 9089 - DNA, 103 bp, synthetic construct
  misc_feature 1..103: note = promoter
  source 1..103: mol_type = other DNA
gagggcctatttcacatgattccttcatatttgcatatacgatagcttaccgtaacttgaaagtatttcgatttcttggctttatatatcttgtggaaaggac

SEQ ID NO: 9090 - DNA, 103 bp, synthetic construct
  misc_feature 1..103: note = promoter
  source 1..103: mol_type = other DNA
gagggcctatttcgcatgattccttcatatttgcatatacgatagcttaccgtaacttgaaagtatttcgatttcttggctttatatatcttgtggaaaggac

SEQ ID NO: 9091 - DNA, 103 bp, synthetic construct
  misc_feature 1..103: note = promoter
  source 1..103: mol_type = other DNA
gagggcctatttctcatgattccttcatatttgcatatacgatagcttaccgtaacttgaaagtatttcgatttcttggctttatatatcttgtggaaaggac

SEQ ID NO: 9092 - DNA, 103 bp, synthetic construct
  misc_feature 1..103: note = promoter
  source 1..103: mol_type = other DNA
gagggcctatttccaatgattccttcatatttgcatatacgatagcttaccgtaacttgaaagtatttcgatttcttggctttatatatcttgtggaaaggac

SEQ ID NO: 9093 - DNA, 103 bp, synthetic construct
  misc_feature 1..103: note = promoter
  source 1..103: mol_type = other DNA
gagggcctatttccgatgattccttcatatttgcatatacgatagcttaccgtaacttgaaagtatttcgatttcttggctttatatatcttgtggaaaggac

SEQ ID NO: 9094 - DNA, 103 bp, synthetic construct
  misc_feature 1..103: note = promoter
  source 1..103: mol_type = other DNA
gagggcctatttcctatgattccttcatatttgcatatacgatagcttaccgtaacttgaaagtatttcgatttcttggctttatatatcttgtggaaaggac

SEQ ID NO: 9095 - DNA, 103 bp, synthetic construct
  misc_feature 1..103: note = promoter
  source 1..103: mol_type = other DNA
gagggcctatttcccctgattccttcatatttgcatatacgatagcttaccgtaacttgaaagtatttcgatttcttggctttatatatcttgtggaaaggac

SEQ ID NO: 9096 - DNA, 103 bp, synthetic construct
  misc_feature 1..103: note = promoter
  source 1..103: mol_type = other DNA
gagggcctatttcccgtgattccttcatatttgcatatacgatagcttaccgtaacttgaaagtatttcgatttcttggctttatatatcttgtggaaaggac

SEQ ID NO: 9097 - DNA, 103 bp, synthetic construct
  misc_feature 1..103: note = promoter
  source 1..103: mol_type = other DNA
gagggcctatttcccttgattccttcatatttgcatatacgatagcttaccgtaacttgaaagtatttcgatttcttggctttatatatcttgtggaaaggac

SEQ ID NO: 9098 - DNA, 103 bp, synthetic construct
  misc_feature 1..103: note = promoter
  source 1..103: mol_type = other DNA
gagggcctatttcccaagattccttcatatttgcatatacgatagcttaccgtaacttgaaagtatttcgatttcttggctttatatatcttgtggaaaggac

SEQ ID NO: 9099 - DNA, 103 bp, synthetic construct
  misc_feature 1..103: note = promoter
  source 1..103: mol_type = other DNA
gagggcctatttcccacgattccttcatatttgcatatacgatagcttaccgtaacttgaaagtatttcgatttcttggctttatatatcttgtggaaaggac

SEQ ID NO: 9100 - DNA, 103 bp, synthetic construct
  misc_feature 1..103: note = promoter
  source 1..103: mol_type = other DNA
gagggcctatttcccaggattccttcatatttgcatatacgatagcttaccgtaacttgaaagtatttcgatttcttggctttatatatcttgtggaaaggac

SEQ ID NO: 9101 - DNA, 103 bp, synthetic construct
  misc_feature 1..103: note = promoter
  source 1..103: mol_type = other DNA
gagggcctatttcccataattccttcatatttgcatatacgatagcttaccgtaacttgaaagtatttcgatttcttggctttatatatcttgtggaaaggac

SEQ ID NO: 9102 - DNA, 103 bp, synthetic construct
  misc_feature 1..103: note = promoter
  source 1..103: mol_type = other DNA
gagggcctatttcccatcattccttcatatttgcatatacgatagcttaccgtaacttgaaagtatttcgatttcttggctttatatatcttgtggaaaggac

SEQ ID NO: 9103 - DNA, 103 bp, synthetic construct
  misc_feature 1..103: note = promoter
  source 1..103: mol_type = other DNA
gagggcctatttcccattattccttcatatttgcatatacgatagcttaccgtaacttgaaagtatttcgatttcttggctttatatatcttgtggaaaggac

SEQ ID NO: 9104 - DNA, 103 bp, synthetic construct
  misc_feature 1..103: note = promoter
  source 1..103: mol_type = other DNA
gagggcctatttcccatgcttccttcatatttgcatatacgatagcttaccgtaacttgaaagtatttcgatttcttggctttatatatcttgtggaaaggac

SEQ ID NO: 9105 - DNA, 103 bp, synthetic construct
  misc_feature 1..103: note = promoter
  source 1..103: mol_type = other DNA
gagggcctatttcccatggttccttcatatttgcatatacgatagcttaccgtaacttgaaagtatttcgatttcttggctttatatatcttgtggaaaggac

SEQ ID NO: 9106 - DNA, 103 bp, synthetic construct
  misc_feature 1..103: note = promoter
  source 1..103: mol_type = other DNA
gagggcctatttcccatgtttccttcatatttgcatatacgatagcttaccgtaacttgaaagtatttcgatttcttggctttatatatcttgtggaaaggac

SEQ ID NO: 9107 - DNA, 103 bp, synthetic construct
  misc_feature 1..103: note = promoter
  source 1..103: mol_type = other DNA
gagggcctatttcccatgaatccttcatatttgcatatacgatagcttaccgtaacttgaaagtatttcgatttcttggctttatatatcttgtggaaaggac

SEQ ID NO: 9108 - DNA, 103 bp, synthetic construct
  misc_feature 1..103: note = promoter
  source 1..103: mol_type = other DNA
gagggcctatttcccatgactccttcatatttgcatatacgatagcttaccgtaacttgaaagtatttcgatttcttggctttatatatcttgtggaaaggac

SEQ ID NO: 9109 - DNA, 103 bp, synthetic construct
  misc_feature 1..103: note = promoter
  source 1..103: mol_type = other DNA
gagggcctatttcccatgagtccttcatatttgcatatacgatagcttaccgtaacttgaaagtatttcgatttcttggctttatatatcttgtggaaaggac

SEQ ID NO: 9110 - DNA, 103 bp, synthetic construct
  misc_feature 1..103: note = promoter
  source 1..103: mol_type = other DNA
gagggcctatttcccatgataccttcatatttgcatatacgatagcttaccgtaacttgaaagtatttcgatttcttggctttatatatcttgtggaaaggac

SEQ ID NO: 9111 - DNA, 103 bp, synthetic construct
  misc_feature 1..103: note = promoter
  source 1..103: mol_type = other DNA
gagggcctatttcccatgatcccttcatatttgcatatacgatagcttaccgtaacttgaaagtatttcgatttcttggctttatatatcttgtggaaaggac

SEQ ID NO: 9112 - DNA, 103 bp, synthetic construct
  misc_feature 1..103: note = promoter
  source 1..103: mol_type = other DNA
gagggcctatttcccatgatgccttcatatttgcatatacgatagcttaccgtaacttgaaagtatttcgatttcttggctttatatatcttgtggaaaggac

SEQ ID NO: 9113 - DNA, 103 bp, synthetic construct
  misc_feature 1..103: note = promoter
  source 1..103: mol_type = other DNA
gagggcctatttcccatgattacttcatatttgcatatacgatagcttaccgtaacttgaaagtatttcgatttcttggctttatatatcttgtggaaaggac

SEQ ID NO: 9114 - DNA, 103 bp, synthetic construct
  misc_feature 1..103: note = promoter
  source 1..103: mol_type = other DNA
gagggcctatttcccatgattgcttcatatttgcatatacgatagcttaccgtaacttgaaagtatttcgatttcttggctttatatatcttgtggaaaggac

SEQ ID NO: 9115 - DNA, 103 bp, synthetic construct
  misc_feature 1..103: note = promoter
  source 1..103: mol_type = other DNA
gagggcctatttcccatgatttcttcatatttgcatatacgatagcttaccgtaacttgaaagtatttcgatttcttggctttatatatcttgtggaaaggac

SEQ ID NO: 9116 - DNA, 103 bp, synthetic construct
  misc_feature 1..103: note = promoter
  source 1..103: mol_type = other DNA
gagggcctatttcccatgattcattcatatttgcatatacgatagcttaccgtaacttgaaagtatttcgatttcttggctttatatatcttgtggaaaggac

SEQ ID NO: 9117 - DNA, 103 bp, synthetic construct
  misc_feature 1..103: note = promoter
  source 1..103: mol_type = other DNA
gagggcctatttcccatgattcgttcatatttgcatatacgatagcttaccgtaacttgaaagtatttcgatttcttggctttatatatcttgtggaaaggac

SEQ ID NO: 9118 - DNA, 103 bp, synthetic construct
  misc_feature 1..103: note = promoter
  source 1..103: mol_type = other DNA
gagggcctatttcccatgattctttcatatttgcatatacgatagcttaccgtaacttgaaagtatttcgatttcttggctttatatatcttgtggaaaggac

SEQ ID NO: 9119 - DNA, 103 bp, synthetic construct
  misc_feature 1..103: note = promoter
  source 1..103: mol_type = other DNA
gagggcctatttcccatgattccatcatatttgcatatacgatagcttaccgtaacttgaaagtatttcgatttcttggctttatatatcttgtggaaaggac

SEQ ID NO: 9120 - DNA, 103 bp, synthetic construct
  misc_feature 1..103: note = promoter
  source 1..103: mol_type = other DNA
gagggcctatttcccatgattccctcatatttgcatatacgatagcttaccgtaacttgaaagtatttcgatttcttggctttatatatcttgtggaaaggac

SEQ ID NO: 9121 - DNA, 103 bp, synthetic construct
  misc_feature 1..103: note = promoter
  source 1..103: mol_type = other DNA
gagggcctatttcccatgattccgtcatatttgcatatacgatagcttaccgtaacttgaaagtatttcgatttcttggctttatatatcttgtggaaaggac

SEQ ID NO: 9122 - DNA, 103 bp, synthetic construct
  misc_feature 1..103: note = promoter
  source 1..103: mol_type = other DNA
gagggcctatttcccatgattcctacatatttgcatatacgatagcttaccgtaacttgaaagtatttcgatttcttggctttatatatcttgtggaaaggac

SEQ ID NO: 9123 - DNA, 103 bp, synthetic construct
  misc_feature 1..103: note = promoter
  source 1..103: mol_type = other DNA
gagggcctatttcccatgattcctccatatttgcatatacgatagcttaccgtaacttgaaagtatttcgatttcttggctttatatatcttgtggaaaggac

SEQ ID NO: 9124 - DNA, 103 bp, synthetic construct
  misc_feature 1..103: note = promoter
  source 1..103: mol_type = other DNA
gagggcctatttcccatgattcctgcatatttgcatatacgatagcttaccgtaacttgaaagtatttcgatttcttggctttatatatcttgtggaaaggac

SEQ ID NO: 9125 - DNA, 103 bp, synthetic construct
  misc_feature 1..103: note = promoter
  source 1..103: mol_type = other DNA
gagggcctatttcccatgattccttaatatttgcatatacgatagcttaccgtaacttgaaagtatttcgatttcttggctttatatatcttgtggaaaggac

SEQ ID NO: 9126 - DNA, 103 bp, synthetic construct
  misc_feature 1..103: note = promoter
  source 1..103: mol_type = other DNA
gagggcctatttcccatgattccttgatatttgcatatacgatagcttaccgtaacttgaaagtatttcgatttcttggctttatatatcttgtggaaaggac

SEQ ID NO: 9127 - DNA, 103 bp, synthetic construct
  misc_feature 1..103: note = promoter
  source 1..103: mol_type = other DNA
gagggcctatttcccatgattcctttatatttgcatatacgatagcttaccgtaacttgaaagtatttcgatttcttggctttatatatcttgtggaaaggac

SEQ ID NO: 9128 - DNA, 103 bp, synthetic construct
  misc_feature 1..103: note = promoter
  source 1..103: mol_type = other DNA
gagggcctatttcccatgattccttcctatttgcatatacgatagcttaccgtaacttgaaagtatttcgatttcttggctttatatatcttgtggaaaggac

SEQ ID NO: 9129 - DNA, 103 bp, synthetic construct
  misc_feature 1..103: note = promoter
  source 1..103: mol_type = other DNA
gagggcctatttcccatgattccttcgtatttgcatatacgatagcttaccgtaacttgaaagtatttcgatttcttggctttatatatcttgtggaaaggac

SEQ ID NO: 9130 - DNA, 103 bp, synthetic construct
  misc_feature 1..103: note = promoter
  source 1..103: mol_type = other DNA
gagggcctatttcccatgattccttcttatttgcatatacgatagcttaccgtaacttgaaagtatttcgatttcttggctttatatatcttgtggaaaggac

SEQ ID NO: 9131 - DNA, 103 bp, synthetic construct
  misc_feature 1..103: note = promoter
  source 1..103: mol_type = other DNA
gagggcctatttcccatgattccttcaaatttgcatatacgatagcttaccgtaacttgaaagtatttcgatttcttggctttatatatcttgtggaaaggac

SEQ ID NO: 9132 - DNA, 103 bp, synthetic construct
  misc_feature 1..103: note = promoter
  source 1..103: mol_type = other DNA
gagggcctatttcccatgattccttcacatttgcatatacgatagcttaccgtaacttgaaagtatttcgatttcttggctttatatatcttgtggaaaggac

SEQ ID NO: 9133 - DNA, 103 bp, synthetic construct
  misc_feature 1..103: note = promoter
  source 1..103: mol_type = other DNA
gagggcctatttcccatgattccttcagatttgcatatacgatagcttaccgtaacttgaaagtatttcgatttcttggctttatatatcttgtggaaaggac

SEQ ID NO: 9134 - DNA, 103 bp, synthetic construct
  misc_feature 1..103: note = promoter
  source 1..103: mol_type = other DNA
gagggcctatttcccatgattccttcatctttgcatatacgatagcttaccgtaacttgaaagtatttcgatttcttggctttatatatcttgtggaaaggac

SEQ ID NO: 9135 - DNA, 103 bp, synthetic construct
  misc_feature 1..103: note = promoter
  source 1..103: mol_type = other DNA
gagggcctatttcccatgattccttcatgtttgcatatacgatagcttaccgtaacttgaaagtatttcgatttcttggctttatatatcttgtggaaaggac

SEQ ID NO: 9136 - DNA, 103 bp, synthetic construct
  misc_feature 1..103: note = promoter
  source 1..103: mol_type = other DNA
gagggcctatttcccatgattccttcatttttgcatatacgatagcttaccgtaacttgaaagtatttcgatttcttggctttatatatcttgtggaaaggac

SEQ ID NO: 9137 - DNA, 103 bp, synthetic construct
  misc_feature 1..103: note = promoter
  source 1..103: mol_type = other DNA
gagggcctatttcccatgattccttcataattgcatatacgatagcttaccgtaacttgaaagtatttcgatttcttggctttatatatcttgtggaaaggac

SEQ ID NO: 9138 - DNA, 103 bp, synthetic construct
  misc_feature 1..103: note = promoter
  source 1..103: mol_type = other DNA
gagggcctatttcccatgattccttcatacttgcatatacgatagcttaccgtaacttgaaagtatttcgatttcttggctttatatatcttgtggaaaggac

SEQ ID NO: 9139 - DNA, 103 bp, synthetic construct
  misc_feature 1..103: note = promoter
  source 1..103: mol_type = other DNA
gagggcctatttcccatgattccttcatagttgcatatacgatagcttaccgtaacttgaaagtatttcgatttcttggctttatatatcttgtggaaaggac

SEQ ID NO: 9140 - DNA, 103 bp, synthetic construct
  misc_feature 1..103: note = promoter
  source 1..103: mol_type = other DNA
gagggcctatttcccatgattccttcatatatgcatatacgatagcttaccgtaacttgaaagtatttcgatttcttggctttatatatcttgtggaaaggac

SEQ ID NO: 9141 - DNA, 103 bp, synthetic construct
  misc_feature 1..103: note = promoter
  source 1..103: mol_type = other DNA
gagggcctatttcccatgattccttcatatctgcatatacgatagcttaccgtaacttgaaagtatttcgatttcttggctttatatatcttgtggaaaggac

SEQ ID NO: 9142 - DNA, 103 bp, synthetic construct
  misc_feature 1..103: note = promoter
  source 1..103: mol_type = other DNA
gagggcctatttcccatgattccttcatatgtgcatatacgatagcttaccgtaacttgaaagtatttcgatttcttggctttatatatcttgtggaaaggac

SEQ ID NO: 9143 - DNA, 103 bp, synthetic construct
  misc_feature 1..103: note = promoter
  source 1..103: mol_type = other DNA
gagggcctatttcccatgattccttcatattagcatatacgatagcttaccgtaacttgaaagtatttcgatttcttggctttatatatcttgtggaaaggac

SEQ ID NO: 9144 - DNA, 103 bp, synthetic construct
  misc_feature 1..103: note = promoter
  source 1..103: mol_type = other DNA
gagggcctatttcccatgattccttcatattcgcatatacgatagcttaccgtaacttgaaagtatttcgatttcttggctttatatatcttgtggaaaggac

SEQ ID NO: 9145 - DNA, 103 bp, synthetic construct
  misc_feature 1..103: note = promoter
  source 1..103: mol_type = other DNA
gagggcctatttcccatgattccttcatattggcatatacgatagcttaccgtaacttgaaagtatttcgatttcttggctttatatatcttgtggaaaggac

SEQ ID NO: 9146 - DNA, 103 bp, synthetic construct
  misc_feature 1..103: note = promoter
  source 1..103: mol_type = other DNA
gagggcctatttcccatgattccttcatatttacatatacgatagcttaccgtaacttgaaagtatttcgatttcttggctttatatatcttgtggaaaggac

SEQ ID NO: 9147 - DNA, 103 bp, synthetic construct
  misc_feature 1..103: note = promoter
  source 1..103: mol_type = other DNA
gagggcctatttcccatgattccttcatatttccatatacgatagcttaccgtaacttgaaagtatttcgatttcttggctttatatatcttgtggaaaggac

SEQ ID NO: 9148 - DNA, 103 bp, synthetic construct
  misc_feature 1..103: note = promoter
  source 1..103: mol_type = other DNA
gagggcctatttcccatgattccttcatattttcatatacgatagcttaccgtaacttgaaagtatttcgatttcttggctttatatatcttgtggaaaggac

SEQ ID NO: 9149 - DNA, 103 bp, synthetic construct
  misc_feature 1..103: note = promoter
  source 1..103: mol_type = other DNA
gagggcctatttcccatgattccttcatatttgaatatacgatagcttaccgtaacttgaaagtatttcgatttcttggctttatatatcttgtggaaaggac

SEQ ID NO: 9150 - DNA, 103 bp, synthetic construct
  misc_feature 1..103: note = promoter
  source 1..103: mol_type = other DNA
gagggcctatttcccatgattccttcatatttggatatacgatagcttaccgtaacttgaaagtatttcgatttcttggctttatatatcttgtggaaaggac

SEQ ID NO: 9151 - DNA, 103 bp, synthetic construct
  misc_feature 1..103: note = promoter
  source 1..103: mol_type = other DNA
gagggcctatttcccatgattccttcatatttgtatatacgatagcttaccgtaacttgaaagtatttcgatttcttggctttatatatcttgtggaaaggac

SEQ ID NO: 9152 - DNA, 103 bp, synthetic construct
  misc_feature 1..103: note = promoter
  source 1..103: mol_type = other DNA
gagggcctatttcccatgattccttcatatttgcctatacgatagcttaccgtaacttgaaagtatttcgatttcttggctttatatatcttgtggaaaggac

SEQ ID NO: 9153 - DNA, 103 bp, synthetic construct
  misc_feature 1..103: note = promoter
  source 1..103: mol_type = other DNA
gagggcctatttcccatgattccttcatatttgcgtatacgatagcttaccgtaacttgaaagtatttcgatttcttggctttatatatcttgtggaaaggac

SEQ ID NO: 9154 - DNA, 103 bp, synthetic construct
  misc_feature 1..103: note = promoter
  source 1..103: mol_type = other DNA
gagggcctatttcccatgattccttcatatttgcttatacgatagcttaccgtaacttgaaagtatttcgatttcttggctttatatatcttgtggaaaggac

SEQ ID NO: 9155 - DNA, 103 bp, synthetic construct
  misc_feature 1..103: note = promoter
  source 1..103: mol_type = other DNA
gagggcctatttcccatgattccttcatatttgcaaatacgatagcttaccgtaacttgaaagtatttcgatttcttggctttatatatcttgtggaaaggac

SEQ ID NO: 9156 - DNA, 103 bp, synthetic construct
  misc_feature 1..103: note = promoter
  source 1..103: mol_type = other DNA
gagggcctatttcccatgattccttcatatttgcacatacgatagcttaccgtaacttgaaagtatttcgatttcttggctttatatatcttgtggaaaggac

SEQ ID NO: 9157 - DNA, 103 bp, synthetic construct
  misc_feature 1..103: note = promoter
  source 1..103: mol_type = other DNA
gagggcctatttcccatgattccttcatatttgcagatacgatagcttaccgtaacttgaaagtatttcgatttcttggctttatatatcttgtggaaaggac

SEQ ID NO: 9158 - DNA, 103 bp, synthetic construct
  misc_feature 1..103: note = promoter
  source 1..103: mol_type = other DNA
gagggcctatttcccatgattccttcatatttgcatctacgatagcttaccgtaacttgaaagtatttcgatttcttggctttatatatcttgtggaaaggac

SEQ ID NO: 9159 - DNA, 103 bp, synthetic construct
  misc_feature 1..103: note = promoter
  source 1..103: mol_type = other DNA
gagggcctatttcccatgattccttcatatttgcatgtacgatagcttaccgtaacttgaaagtatttcgatttcttggctttatatatcttgtggaaaggac

SEQ ID NO: 9160 - DNA, 103 bp, synthetic construct
  misc_feature 1..103: note = promoter
  source 1..103: mol_type = other DNA
gagggcctatttcccatgattccttcatatttgcatttacgatagcttaccgtaacttgaaagtatttcgatttcttggctttatatatcttgtggaaaggac

SEQ ID NO: 9161 - DNA, 103 bp, synthetic construct
  misc_feature 1..103: note = promoter
  source 1..103: mol_type = other DNA
gagggcctatttcccatgattccttcatatttgcataaacgatagcttaccgtaacttgaaagtatttcgatttcttggctttatatatcttgtggaaaggac

SEQ ID NO: 9162 - DNA, 103 bp, synthetic construct
  misc_feature 1..103: note = promoter
  source 1..103: mol_type = other DNA
gagggcctatttcccatgattccttcatatttgcatacacgatagcttaccgtaacttgaaagtatttcgatttcttggctttatatatcttgtggaaaggac

SEQ ID NO: 9163 - DNA, 103 bp, synthetic construct
  misc_feature 1..103: note = promoter
  source 1..103: mol_type = other DNA
gagggcctatttcccatgattccttcatatttgcatagacgatagcttaccgtaacttgaaagtatttcgatttcttggctttatatatcttgtggaaaggac

SEQ ID NO: 9164 - DNA, 103 bp, synthetic construct
  misc_feature 1..103: note = promoter
  source 1..103: mol_type = other DNA
gagggcctatttcccatgattccttcatatttgcatatccgatagcttaccgtaacttgaaagtatttcgatttcttggctttatatatcttgtggaaaggac

SEQ ID NO: 9165 - DNA, 103 bp, synthetic construct
  misc_feature 1..103: note = promoter
  source 1..103: mol_type = other DNA
gagggcctatttcccatgattccttcatatttgcatatgcgatagcttaccgtaacttgaaagtatttcgatttcttggctttatatatcttgtggaaaggac

SEQ ID NO: 9166 - DNA, 103 bp, synthetic construct
  misc_feature 1..103: note = promoter
  source 1..103: mol_type = other DNA
gagggcctatttcccatgattccttcatatttgcatattcgatagcttaccgtaacttgaaagtatttcgatttcttggctttatatatcttgtggaaaggac

SEQ ID NO: 9167 - DNA, 103 bp, synthetic construct
  misc_feature 1..103: note = promoter
  source 1..103: mol_type = other DNA
gagggcctatttcccatgattccttcatatttgcatataagatagcttaccgtaacttgaaagtatttcgatttcttggctttatatatcttgtggaaaggac

SEQ ID NO: 9168 - DNA, 103 bp, synthetic construct
  misc_feature 1..103: note = promoter
  source 1..103: mol_type = other DNA
gagggcctatttcccatgattccttcatatttgcatataggatagcttaccgtaacttgaaagtatttcgatttcttggctttatatatcttgtggaaaggac

SEQ ID NO: 9169 - DNA, 103 bp, synthetic construct
  misc_feature 1..103: note = promoter
  source 1..103: mol_type = other DNA
gagggcctatttcccatgattccttcatatttgcatatatgatagcttaccgtaacttgaaagtatttcgatttcttggctttatatatcttgtggaaaggac

SEQ ID NO: 9170 - DNA, 103 bp, synthetic construct
  misc_feature 1..103: note = promoter
  source 1..103: mol_type = other DNA
gagggcctatttcccatgattccttcatatttgcatatacaatagcttaccgtaacttgaaagtatttcgatttcttggctttatatatcttgtggaaaggac

SEQ ID NO: 9171 - DNA, 103 bp, synthetic construct
  misc_feature 1..103: note = promoter
  source 1..103: mol_type = other DNA
gagggcctatttcccatgattccttcatatttgcatataccatagcttaccgtaacttgaaagtatttcgatttcttggctttatatatcttgtggaaaggac

SEQ ID NO: 9172 - DNA, 103 bp, synthetic construct
  misc_feature 1..103: note = promoter
  source 1..103: mol_type = other DNA
gagggcctatttcccatgattccttcatatttgcatatactatagcttaccgtaacttgaaagtatttcgatttcttggctttatatatcttgtggaaaggac

SEQ ID NO: 9173 - DNA, 103 bp, synthetic construct
  misc_feature 1..103: note = promoter
  source 1..103: mol_type = other DNA
gagggcctatttcccatgattccttcatatttgcatatacgctagcttaccgtaacttgaaagtatttcgatttcttggctttatatatcttgtggaaaggac

SEQ ID NO: 9174 - DNA, 103 bp, synthetic construct
  misc_feature 1..103: note = promoter
  source 1..103: mol_type = other DNA
gagggcctatttcccatgattccttcatatttgcatatacggtagcttaccgtaacttgaaagtatttcgatttcttggctttatatatcttgtggaaaggac

SEQ ID NO: 9175 - DNA, 103 bp, synthetic construct
  misc_feature 1..103: note = promoter
  source 1..103: mol_type = other DNA
gagggcctatttcccatgattccttcatatttgcatatacgttagcttaccgtaacttgaaagtatttcgatttcttggctttatatatcttgtggaaaggac

SEQ ID NO: 9176 - DNA, 103 bp, synthetic construct
  misc_feature 1..103: note = promoter
  source 1..103: mol_type = other DNA
gagggcctatttcccatgattccttcatatttgcatatacgaaagcttaccgtaacttgaaagtatttcgatttcttggctttatatatcttgtggaaaggac

SEQ ID NO: 9177 - DNA, 103 bp, synthetic construct
  misc_feature 1..103: note = promoter
  source 1..103: mol_type = other DNA
gagggcctatttcccatgattccttcatatttgcatatacgacagcttaccgtaacttgaaagtatttcgatttcttggctttatatatcttgtggaaaggac

SEQ ID NO: 9178 - DNA, 103 bp, synthetic construct
  misc_feature 1..103: note = promoter
  source 1..103: mol_type = other DNA
gagggcctatttcccatgattccttcatatttgcatatacgagagcttaccgtaacttgaaagtatttcgatttcttggctttatatatcttgtggaaaggac

SEQ ID NO: 9179 - DNA, 103 bp, synthetic construct
  misc_feature 1..103: note = promoter
  source 1..103: mol_type = other DNA
gagggcctatttcccatgattccttcatatttgcatatacgatcgcttaccgtaacttgaaagtatttcgatttcttggctttatatatcttgtggaaaggac

SEQ ID NO: 9180 - DNA, 103 bp, synthetic construct
  misc_feature 1..103: note = promoter
  source 1..103: mol_type = other DNA
gagggcctatttcccatgattccttcatatttgcatatacgatggcttaccgtaacttgaaagtatttcgatttcttggctttatatatcttgtggaaaggac

SEQ ID NO: 9181 - DNA, 103 bp, synthetic construct
  misc_feature 1..103: note = promoter
  source 1..103: mol_type = other DNA
gagggcctatttcccatgattccttcatatttgcatatacgattgcttaccgtaacttgaaagtatttcgatttcttggctttatatatcttgtggaaaggac

SEQ ID NO: 9182 - DNA, 103 bp, synthetic construct
  misc_feature 1..103: note = promoter
  source 1..103: mol_type = other DNA
gagggcctatttcccatgattccttcatatttgcatatacgataacttaccgtaacttgaaagtatttcgatttcttggctttatatatcttgtggaaaggac

SEQ ID NO: 9183 - DNA, 103 bp, synthetic construct
  misc_feature 1..103: note = promoter
  source 1..103: mol_type = other DNA
gagggcctatttcccatgattccttcatatttgcatatacgataccttaccgtaacttgaaagtatttcgatttcttggctttatatatcttgtggaaaggac

SEQ ID NO: 9184 - DNA, 103 bp, synthetic construct
  misc_feature 1..103: note = promoter
  source 1..103: mol_type = other DNA
gagggcctatttcccatgattccttcatatttgcatatacgatatcttaccgtaacttgaaagtatttcgatttcttggctttatatatcttgtggaaaggac

SEQ ID NO: 9185 - DNA, 103 bp, synthetic construct
  misc_feature 1..103: note = promoter
  source 1..103: mol_type = other DNA
gagggcctatttcccatgattccttcatatttgcatatacgatagattaccgtaacttgaaagtatttcgatttcttggctttatatatcttgtggaaaggac

SEQ ID NO: 9186 - DNA, 103 bp, synthetic construct
  misc_feature 1..103: note = promoter
  source 1..103: mol_type = other DNA
gagggcctatttcccatgattccttcatatttgcatatacgataggttaccgtaacttgaaagtatttcgatttcttggctttatatatcttgtggaaaggac

SEQ ID NO: 9187 - DNA, 103 bp, synthetic construct
  misc_feature 1..103: note = promoter
  source 1..103: mol_type = other DNA
gagggcctatttcccatgattccttcatatttgcatatacgatagtttaccgtaacttgaaagtatttcgatttcttggctttatatatcttgtggaaaggac

SEQ ID NO: 9188 - DNA, 103 bp, synthetic construct
  misc_feature 1..103: note = promoter
  source 1..103: mol_type = other DNA
gagggcctatttcccatgattccttcatatttgcatatacgatagcataccgtaacttgaaagtatttcgatttcttggctttatatatcttgtggaaaggac

SEQ ID NO: 9189 - DNA, 103 bp, synthetic construct
  misc_feature 1..103: note = promoter
  source 1..103: mol_type = other DNA
gagggcctatttcccatgattccttcatatttgcatatacgatagcctaccgtaacttgaaagtatttcgatttcttggctttatatatcttgtggaaaggac

SEQ ID NO: 9190 - DNA, 103 bp, synthetic construct
  misc_feature 1..103: note = promoter
  source 1..103: mol_type = other DNA
gagggcctatttcccatgattccttcatatttgcatatacgatagcgtaccgtaacttgaaagtatttcgatttcttggctttatatatcttgtggaaaggac

SEQ ID NO: 9191 - DNA, 103 bp, synthetic construct
  misc_feature 1..103: note = promoter
  source 1..103: mol_type = other DNA
gagggcctatttcccatgattccttcatatttgcatatacgatagctaaccgtaacttgaaagtatttcgatttcttggctttatatatcttgtggaaaggac

SEQ ID NO: 9192 - DNA, 103 bp, synthetic construct
  misc_feature 1..103: note = promoter
  source 1..103: mol_type = other DNA
gagggcctatttcccatgattccttcatatttgcatatacgatagctcaccgtaacttgaaagtatttcgatttcttggctttatatatcttgtggaaaggac

SEQ ID NO: 9193 - DNA, 103 bp, synthetic construct
  misc_feature 1..103: note = promoter
  source 1..103: mol_type = other DNA
gagggcctatttcccatgattccttcatatttgcatatacgatagctgaccgtaacttgaaagtatttcgatttcttggctttatatatcttgtggaaaggac

SEQ ID NO: 9194 - DNA, 103 bp, synthetic construct
  misc_feature 1..103: note = promoter
  source 1..103: mol_type = other DNA
gagggcctatttcccatgattccttcatatttgcatatacgatagcttcccgtaacttgaaagtatttcgatttcttggctttatatatcttgtggaaaggac

SEQ ID NO: 9195 - DNA, 103 bp, synthetic construct
  misc_feature 1..103: note = promoter
  source 1..103: mol_type = other DNA
gagggcctatttcccatgattccttcatatttgcatatacgatagcttgccgtaacttgaaagtatttcgatttcttggctttatatatcttgtggaaaggac

SEQ ID NO: 9196 - DNA, 103 bp, synthetic construct
  misc_feature 1..103: note = promoter
  source 1..103: mol_type = other DNA
gagggcctatttcccatgattccttcatatttgcatatacgatagctttccgtaacttgaaagtatttcgatttcttggctttatatatcttgtggaaaggac

SEQ ID NO: 9197 - DNA, 103 bp, synthetic construct
  misc_feature 1..103: note = promoter
  source 1..103: mol_type = other DNA
gagggcctatttcccatgattccttcatatttgcatatacgatagcttaacgtaacttgaaagtatttcgatttcttggctttatatatcttgtggaaaggac

SEQ ID NO: 9198 - DNA, 103 bp, synthetic construct
  misc_feature 1..103: note = promoter
  source 1..103: mol_type = other DNA
gagggcctatttcccatgattccttcatatttgcatatacgatagcttagcgtaacttgaaagtatttcgatttcttggctttatatatcttgtggaaaggac

SEQ ID NO: 9199 - DNA, 103 bp, synthetic construct
  misc_feature 1..103: note = promoter
  source 1..103: mol_type = other DNA
gagggcctatttcccatgattccttcatatttgcatatacgatagcttatcgtaacttgaaagtatttcgatttcttggctttatatatcttgtggaaaggac

SEQ ID NO: 9200 - DNA, 103 bp, synthetic construct
  misc_feature 1..103: note = promoter
  source 1..103: mol_type = other DNA
gagggcctatttcccatgattccttcatatttgcatatacgatagcttacagtaacttgaaagtatttcgatttcttggctttatatatcttgtggaaaggac

SEQ ID NO: 9201 - DNA, 103 bp, synthetic construct
  misc_feature 1..103: note = promoter
  source 1..103: mol_type = other DNA
gagggcctatttcccatgattccttcatatttgcatatacgatagcttacggtaacttgaaagtatttcgatttcttggctttatatatcttgtggaaaggac

SEQ ID NO: 9202 - DNA, 103 bp, synthetic construct
  misc_feature 1..103: note = promoter
  source 1..103: mol_type = other DNA
gagggcctatttcccatgattccttcatatttgcatatacgatagcttactgtaacttgaaagtatttcgatttcttggctttatatatcttgtggaaaggac

SEQ ID NO: 9203 - DNA, 103 bp, synthetic construct
  misc_feature 1..103: note = promoter
  source 1..103: mol_type = other DNA
gagggcctatttcccatgattccttcatatttgcatatacgatagcttaccataacttgaaagtatttcgatttcttggctttatatatcttgtggaaaggac

SEQ ID NO: 9204 - DNA, 103 bp, synthetic construct
  misc_feature 1..103: note = promoter
  source 1..103: mol_type = other DNA
gagggcctatttcccatgattccttcatatttgcatatacgatagcttaccctaacttgaaagtatttcgatttcttggctttatatatcttgtggaaaggac

SEQ ID NO: 9205 - DNA, 103 bp, synthetic construct
  misc_feature 1..103: note = promoter
  source 1..103: mol_type = other DNA
gagggcctatttcccatgattccttcatatttgcatatacgatagcttaccttaacttgaaagtatttcgatttcttggctttatatatcttgtggaaaggac

SEQ ID NO: 9206 - DNA, 103 bp, synthetic construct
  misc_feature 1..103: note = promoter
  source 1..103: mol_type = other DNA
gagggcctatttcccatgattccttcatatttgcatatacgatagcttaccgaaacttgaaagtatttcgatttcttggctttatatatcttgtggaaaggac

SEQ ID NO: 9207 - DNA, 103 bp, synthetic construct
  misc_feature 1..103: note = promoter
  source 1..103: mol_type = other DNA
gagggcctatttcccatgattccttcatatttgcatatacgatagcttaccgcaacttgaaagtatttcgatttcttggctttatatatcttgtggaaaggac

SEQ ID NO: 9208 - DNA, 103 bp, synthetic construct
  misc_feature 1..103: note = promoter
  source 1..103: mol_type = other DNA
gagggcctatttcccatgattccttcatatttgcatatacgatagcttaccggaacttgaaagtatttcgatttcttggctttatatatcttgtggaaaggac

SEQ ID NO: 9209 - DNA, 103 bp, synthetic construct
  misc_feature 1..103: note = promoter
  source 1..103: mol_type = other DNA
gagggcctatttcccatgattccttcatatttgcatatacgatagcttaccgtcacttgaaagtatttcgatttcttggctttatatatcttgtggaaaggac

SEQ ID NO: 9210 - DNA, 103 bp, synthetic construct
  misc_feature 1..103: note = promoter
  source 1..103: mol_type = other DNA
gagggcctatttcccatgattccttcatatttgcatatacgatagcttaccgtgacttgaaagtatttcgatttcttggctttatatatcttgtggaaaggac

SEQ ID NO: 9211 - DNA, 103 bp, synthetic construct
  misc_feature 1..103: note = promoter
  source 1..103: mol_type = other DNA
gagggcctatttcccatgattccttcatatttgcatatacgatagcttaccgttacttgaaagtatttcgatttcttggctttatatatcttgtggaaaggac

SEQ ID NO: 9212 - DNA, 103 bp, synthetic construct
  misc_feature 1..103: note = promoter
  source 1..103: mol_type = other DNA
gagggcctatttcccatgattccttcatatttgcatatacgatagcttaccgtaccttgaaagtatttcgatttcttggctttatatatcttgtggaaaggac

SEQ ID NO: 9213 - DNA, 103 bp, synthetic construct
  misc_feature 1..103: note = promoter
  source 1..103: mol_type = other DNA
gagggcctatttcccatgattccttcatatttgcatatacgatagcttaccgtagcttgaaagtatttcgatttcttggctttatatatcttgtggaaaggac

SEQ ID NO: 9214 - DNA, 103 bp, synthetic construct
  misc_feature 1..103: note = promoter
  source 1..103: mol_type = other DNA
gagggcctatttcccatgattccttcatatttgcatatacgatagcttaccgtatcttgaaagtatttcgatttcttggctttatatatcttgtggaaaggac

SEQ ID NO: 9215 - DNA, 103 bp, synthetic construct
  misc_feature 1..103: note = promoter
  source 1..103: mol_type = other DNA
gagggcctatttcccatgattccttcatatttgcatatacgatagcttaccgtaaattgaaagtatttcgatttcttggctttatatatcttgtggaaaggac

SEQ ID NO: 9216 - DNA, 103 bp, synthetic construct
  misc_feature 1..103: note = promoter
  source 1..103: mol_type = other DNA
gagggcctatttcccatgattccttcatatttgcatatacgatagcttaccgtaagttgaaagtatttcgatttcttggctttatatatcttgtggaaaggac

SEQ ID NO: 9217 - DNA, 103 bp, synthetic construct
  misc_feature 1..103: note = promoter
  source 1..103: mol_type = other DNA
gagggcctatttcccatgattccttcatatttgcatatacgatagcttaccgtaatttgaaagtatttcgatttcttggctttatatatcttgtggaaaggac

SEQ ID NO: 9218 - DNA, 103 bp, synthetic construct
  misc_feature 1..103: note = promoter
  source 1..103: mol_type = other DNA
gagggcctatttcccatgattccttcatatttgcatatacgatagcttaccgtaacatgaaagtatttcgatttcttggctttatatatcttgtggaaaggac

SEQ ID NO: 9219 - DNA, 103 bp, synthetic construct
  misc_feature 1..103: note = promoter
  source 1..103: mol_type = other DNA
gagggcctatttcccatgattccttcatatttgcatatacgatagcttaccgtaacctgaaagtatttcgatttcttggctttatatatcttgtggaaaggac

SEQ ID NO: 9220 - DNA, 103 bp, synthetic construct
  misc_feature 1..103: note = promoter
  source 1..103: mol_type = other DNA
gagggcctatttcccatgattccttcatatttgcatatacgatagcttaccgtaacgtgaaagtatttcgatttcttggctttatatatcttgtggaaaggac

SEQ ID NO: 9221 - DNA, 103 bp, synthetic construct
  misc_feature 1..103: note = promoter
  source 1..103: mol_type = other DNA
gagggcctatttcccatgattccttcatatttgcatatacgatagcttaccgtaactagaaagtatttcgatttcttggctttatatatcttgtggaaaggac

SEQ ID NO: 9222 - DNA, 103 bp, synthetic construct
  misc_feature 1..103: note = promoter
  source 1..103: mol_type = other DNA
gagggcctatttcccatgattccttcatatttgcatatacgatagcttaccgtaactcgaaagtatttcgatttcttggctttatatatcttgtggaaaggac

SEQ ID NO: 9223 - DNA, 103 bp, synthetic construct
  misc_feature 1..103: note = promoter
  source 1..103: mol_type = other DNA
gagggcctatttcccatgattccttcatatttgcatatacgatagcttaccgtaactggaaagtatttcgatttcttggctttatatatcttgtggaaaggac

SEQ ID NO: 9224 - DNA, 103 bp, synthetic construct
  misc_feature 1..103: note = promoter
  source 1..103: mol_type = other DNA
gagggcctatttcccatgattccttcatatttgcatatacgatagcttaccgtaacttaaaagtatttcgatttcttggctttatatatcttgtggaaaggac

SEQ ID NO: 9225 - DNA, 103 bp, synthetic construct
  misc_feature 1..103: note = promoter
  source 1..103: mol_type = other DNA
gagggcctatttcccatgattccttcatatttgcatatacgatagcttaccgtaacttcaaagtatttcgatttcttggctttatatatcttgtggaaaggac

SEQ ID NO: 9226 - DNA, 103 bp, synthetic construct
  misc_feature 1..103: note = promoter
  source 1..103: mol_type = other DNA
gagggcctatttcccatgattccttcatatttgcatatacgatagcttaccgtaactttaaagtatttcgatttcttggctttatatatcttgtggaaaggac

SEQ ID NO: 9227 - DNA, 103 bp, synthetic construct
  misc_feature 1..103: note = promoter
  source 1..103: mol_type = other DNA
gagggcctatttcccatgattccttcatatttgcatatacgatagcttaccgtaacttgcaagtatttcgatttcttggctttatatatcttgtggaaaggac

SEQ ID NO: 9228 - DNA, 103 bp, synthetic construct
  misc_feature 1..103: note = promoter
  source 1..103: mol_type = other DNA
gagggcctatttcccatgattccttcatatttgcatatacgatagcttaccgtaacttggaagtatttcgatttcttggctttatatatcttgtggaaaggac

SEQ ID NO: 9229 - DNA, 103 bp, synthetic construct
  misc_feature 1..103: note = promoter
  source 1..103: mol_type = other DNA
gagggcctatttcccatgattccttcatatttgcatatacgatagcttaccgtaacttgtaagtatttcgatttcttggctttatatatcttgtggaaaggac

SEQ ID NO: 9230 - DNA, 103 bp, synthetic construct
  misc_feature 1..103: note = promoter
  source 1..103: mol_type = other DNA
gagggcctatttcccatgattccttcatatttgcatatacgatagcttaccgtaacttgacagtatttcgatttcttggctttatatatcttgtggaaaggac

SEQ ID NO: 9231 - DNA, 103 bp, synthetic construct
  misc_feature 1..103: note = promoter
  source 1..103: mol_type = other DNA
gagggcctatttcccatgattccttcatatttgcatatacgatagcttaccgtaacttgagagtatttcgatttcttggctttatatatcttgtggaaaggac

SEQ ID NO: 9232 - DNA, 103 bp, synthetic construct
  misc_feature 1..103: note = promoter
  source 1..103: mol_type = other DNA
gagggcctatttcccatgattccttcatatttgcatatacgatagcttaccgtaacttgatagtatttcgatttcttggctttatatatcttgtggaaaggac

SEQ ID NO: 9233 - DNA, 103 bp, synthetic construct
  misc_feature 1..103: note = promoter
  source 1..103: mol_type = other DNA
gagggcctatttcccatgattccttcatatttgcatatacgatagcttaccgtaacttgaacgtatttcgatttcttggctttatatatcttgtggaaaggac

SEQ ID NO: 9234 - DNA, 103 bp, synthetic construct
  misc_feature 1..103: note = promoter
  source 1..103: mol_type = other DNA
gagggcctatttcccatgattccttcatatttgcatatacgatagcttaccgtaacttgaaggtatttcgatttcttggctttatatatcttgtggaaaggac

SEQ ID NO: 9235 - DNA, 103 bp, synthetic construct
  misc_feature 1..103: note = promoter
  source 1..103: mol_type = other DNA
gagggcctatttcccatgattccttcatatttgcatatacgatagcttaccgtaacttgaatgtatttcgatttcttggctttatatatcttgtggaaaggac

SEQ ID NO: 9236 - DNA, 103 bp, synthetic construct
  misc_feature 1..103: note = promoter
  source 1..103: mol_type = other DNA
gagggcctatttcccatgattccttcatatttgcatatacgatagcttaccgtaacttgaaaatatttcgatttcttggctttatatatcttgtggaaaggac

SEQ ID NO: 9237 - DNA, 103 bp, synthetic construct
  misc_feature 1..103: note = promoter
  source 1..103: mol_type = other DNA
gagggcctatttcccatgattccttcatatttgcatatacgatagcttaccgtaacttgaaactatttcgatttcttggctttatatatcttgtggaaaggac

SEQ ID NO: 9238 - DNA, 103 bp, synthetic construct
  misc_feature 1..103: note = promoter
  source 1..103: mol_type = other DNA
gagggcctatttcccatgattccttcatatttgcatatacgatagcttaccgtaacttgaaattatttcgatttcttggctttatatatcttgtggaaaggac

SEQ ID NO: 9239 - DNA, 103 bp, synthetic construct
  misc_feature 1..103: note = promoter
  source 1..103: mol_type = other DNA
gagggcctatttcccatgattccttcatatttgcatatacgatagcttaccgtaacttgaaagaatttcgatttcttggctttatatatcttgtggaaaggac

SEQ ID NO: 9240 - DNA, 103 bp, synthetic construct
  misc_feature 1..103: note = promoter
  source 1..103: mol_type = other DNA
gagggcctatttcccatgattccttcatatttgcatatacgatagcttaccgtaacttgaaagcatttcgatttcttggctttatatatcttgtggaaaggac

SEQ ID NO: 9241 - DNA, 103 bp, synthetic construct
  misc_feature 1..103: note = promoter
  source 1..103: mol_type = other DNA
gagggcctatttcccatgattccttcatatttgcatatacgatagcttaccgtaacttgaaaggatttcgatttcttggctttatatatcttgtggaaaggac

SEQ ID NO: 9242 - DNA, 103 bp, synthetic construct
  misc_feature 1..103: note = promoter
  source 1..103: mol_type = other DNA
gagggcctatttcccatgattccttcatatttgcatatacgatagcttaccgtaacttgaaagtctttcgatttcttggctttatatatcttgtggaaaggac

SEQ ID NO: 9243 - DNA, 103 bp, synthetic construct
  misc_feature 1..103: note = promoter
  source 1..103: mol_type = other DNA
gagggcctatttcccatgattccttcatatttgcatatacgatagcttaccgtaacttgaaagtgtttcgatttcttggctttatatatcttgtggaaaggac

SEQ ID NO: 9244 - DNA, 103 bp, synthetic construct
  misc_feature 1..103: note = promoter
  source 1..103: mol_type = other DNA
gagggcctatttcccatgattccttcatatttgcatatacgatagcttaccgtaacttgaaagtttttcgatttcttggctttatatatcttgtggaaaggac

SEQ ID NO: 9245 - DNA, 103 bp, synthetic construct
  misc_feature 1..103: note = promoter
  source 1..103: mol_type = other DNA
gagggcctatttcccatgattccttcatatttgcatatacgatagcttaccgtaacttgaaagtaattcgatttcttggctttatatatcttgtggaaaggac

SEQ ID NO: 9246 - DNA, 103 bp, synthetic construct
  misc_feature 1..103: note = promoter
  source 1..103: mol_type = other DNA
gagggcctatttcccatgattccttcatatttgcatatacgatagcttaccgtaacttgaaagtacttcgatttcttggctttatatatcttgtggaaaggac

SEQ ID NO: 9247 - DNA, 103 bp, synthetic construct
  misc_feature 1..103: note = promoter
  source 1..103: mol_type = other DNA
gagggcctatttcccatgattccttcatatttgcatatacgatagcttaccgtaacttgaaagtagttcgatttcttggctttatatatcttgtggaaaggac

SEQ ID NO: 9248 - DNA, 103 bp, synthetic construct
  misc_feature 1..103: note = promoter
  source 1..103: mol_type = other DNA
gagggcctatttcccatgattccttcatatttgcatatacgatagcttaccgtaacttgaaagtatatcgatttcttggctttatatatcttgtggaaaggac

SEQ ID NO: 9249 - DNA, 103 bp, synthetic construct
  misc_feature 1..103: note = promoter
  source 1..103: mol_type = other DNA
gagggcctatttcccatgattccttcatatttgcatatacgatagcttaccgtaacttgaaagtatctcgatttcttggctttatatatcttgtggaaaggac

SEQ ID NO: 9250 - DNA, 103 bp, synthetic construct
  misc_feature 1..103: note = promoter
  source 1..103: mol_type = other DNA
gagggcctatttcccatgattccttcatatttgcatatacgatagcttaccgtaacttgaaagtatgtcgatttcttggctttatatatcttgtggaaaggac

SEQ ID NO: 9251 - DNA, 103 bp, synthetic construct
  misc_feature 1..103: note = promoter
  source 1..103: mol_type = other DNA
gagggcctatttcccatgattccttcatatttgcatatacgatagcttaccgtaacttgaaagtattacgatttcttggctttatatatcttgtggaaaggac

SEQ ID NO: 9252 - DNA, 103 bp, synthetic construct
  misc_feature 1..103: note = promoter
  source 1..103: mol_type = other DNA
gagggcctatttcccatgattccttcatatttgcatatacgatagcttaccgtaacttgaaagtattccgatttcttggctttatatatcttgtggaaaggac

SEQ ID NO: 9253 - DNA, 103 bp, synthetic construct
  misc_feature 1..103: note = promoter
  source 1..103: mol_type = other DNA
gagggcctatttcccatgattccttcatatttgcatatacgatagcttaccgtaacttgaaagtattgcgatttcttggctttatatatcttgtggaaaggac

SEQ ID NO: 9254 - DNA, 103 bp, synthetic construct
  misc_feature 1..103: note = promoter
  source 1..103: mol_type = other DNA
gagggcctatttcccatgattccttcatatttgcatatacgatagcttaccgtaacttgaaagtatttagatttcttggctttatatatcttgtggaaaggac

SEQ ID NO: 9255 - DNA, 103 bp, synthetic construct
  misc_feature 1..103: note = promoter
  source 1..103: mol_type = other DNA
gagggcctatttcccatgattccttcatatttgcatatacgatagcttaccgtaacttgaaagtatttggatttcttggctttatatatcttgtggaaaggac

SEQ ID NO: 9256 - DNA, 103 bp, synthetic construct
  misc_feature 1..103: note = promoter
  source 1..103: mol_type = other DNA
gagggcctatttcccatgattccttcatatttgcatatacgatagcttaccgtaacttgaaagtattttgatttcttggctttatatatcttgtggaaaggac

SEQ ID NO: 9257 - RNA, 96 nt, synthetic construct; identical to SEQ ID NO: 2373
  misc_feature 1..96: note = gNA Variant Scaffold
  source 1..96: mol_type = other RNA

SEQ ID NO: 9258 - RNA, 145 nt, synthetic construct; identical to SEQ ID NO: 2374
  misc_feature 1..145: note = gNA Variant Scaffold
  source 1..145: mol_type = other RNA

SEQ ID NO: 9259 - RNA, 155 nt, synthetic construct; identical to SEQ ID NO: 2375
  misc_feature 1..155: note = gNA Variant Scaffold
  source 1..155: mol_type = other RNA

SEQ ID NO: 9260 - RNA, 159 nt, synthetic construct
  misc_feature 1..159: note = gNA Variant Scaffold
  source 1..159: mol_type = other RNA
actggcgcttctatctgattactctgagcgccatcaccagcgactatgtcgtagtgggtaaagctgcactatgggcgcagacatggcagtcgtaacgacgcgggtctgacggtacaggccacatgaggatcacccatgtggtatagtgcagcatcagag

SEQ ID NO: 9261 - RNA, 145 nt, synthetic construct
  misc_feature 1..145: note = gNA Variant Scaffold
  source 1..145: mol_type = other RNA
actggcgcttttatctgattactttgagagccatcaccagcgactatgtcgtagtgggtaaagctgcactatggggccacatgaggatcacccatgtggtgtacagcgcagcgtcaatgacgctgacgatagtgcagcatcaaag

SEQ ID NO: 9262 - RNA, 436 nt, synthetic construct
  misc_feature 1..436: note = gNA Variant Scaffold
  source 1..436: mol_type = other RNA
actggcgcttttatctgattactttgagagccatcaccagcgactatgtcgtagtgggtaaagctgcactatgggcgcagctcatgaggatcacccatgagctgacggtacaggccacatgaggatcacccatgtggtatagtgcagcatcaaagctgcattctagttgtggtttcacaattattcttgagtgtagtctcgtcattcaccaaatctttgtttggtgcgcgcggccggcatggtcccagcctcctcgctggcgccggctgggcaacattccgaggggaccgtcccctcggtaatggcgaatgggacgtcgactgctaacaaagcccgaaaggaagctgagttggctgctgccaccgctgagcaataactagcataaccccttggggcctctaaacgggtcttgaggggttttttgctgatttttttt

SEQ ID NO: 9263 - RNA, 272 nt, synthetic construct
  misc_feature 1..272: note = gNA Variant Scaffold
  source 1..272: mol_type = other RNA
actggcgcttttatctgattactttgagagccatcaccagcgactatgtcgtagtgggtaaagctgcactatgggcgcagctcatgaggatcacccatgagctgacggtacaggccacatgaggatcacccatgtggtatagtgcagcatcaaagctgcattctagttgtggtttatggccggcatggtcccagcctcctcgctggcgccggctgggcaacattccgaggggaccgccccctcggtaatggcgaatgggacccatttttttt

SEQ ID NO: 9264 - RNA, 271 nt, synthetic construct
  misc_feature 1..271: note = gNA Variant Scaffold
  source 1..271: mol_type = other RNA
actggcgcttttatctgattactttgagagccatcaccagcgactatgtcgtagtgggtaaagctgcactatgggcgcagctcatgaggatcacccatgagctgacggtacaggccacatgaggatcacccatgtggtatagtgcagcatcaaagctgcattctagttgtggtttgtggccggcatggtccagcctactcgctggcgcgggctgggcaacattccgaggggacccgtccctcggtaatggcgaatgggacccatttttttt

SEQ ID NO: 9265 - RNA, 274 nt, synthetic construct
  misc_feature 1..274: note = gNA Variant Scaffold
  source 1..274: mol_type = other RNA
actggcgcttttatctgattactttgagagccatcaccagcgactatgtcgtagtgggtaaagctgcactatgggcgcagctcatgaggatcacccatgagctgacggtacaggccacatgaggatcacccatgtggtatagtgcagcatcaaagctgcattctagttgtggtttgtggccggcatggccccagcctcctcgctggcgccggctgggcaacgatccgaggggactgtccctctcgagaatcggcaaatggggcccctttttttt

SEQ ID NO: 9266 - RNA, 283 nt, synthetic construct
  misc_feature 1..283: note = gNA Variant Scaffold
  source 1..283: mol_type = other RNA
actggcgcttttatctgattactttgagagccatcaccagcgactatgtcgtagtgggtaaagctgcactatgggcgcagctcatgaggatcacccatgagctgacggtacaggccacatgaggatcacccatgtggtatagtgcagcatcaaagctgcattctagttgtggttttcgggtcggcatggcatctccacctccacctcctcgcggtccgacctgggcatccgaaggaggagcggacgtccactcggatggctaagggagagcccagtttttttt

SEQ ID NO: 9267 - RNA, 276 nt, synthetic construct
  misc_feature 1..276: note = gNA Variant Scaffold
  source 1..276: mol_type = other RNA
actggcgcttttatctgattactttgagagccatcaccagcgactatgtcgtagtgggtaaagctgcactatgggcgcagctcatgaggatcacccatgagctgacggtacaggccacatgaggatcacccatgtggtatagtgcagcatcaaagctgcattctagttgtggttttcgggtcggcatggcatctccacctccccgtggtccgacctgggcatccgaaggaggacggacgtccactcggatggctaagggagtgccggctttttttt

SEQ ID NO: 9268 - RNA, 251 nt, synthetic construct
  misc_feature 1..251: note = gNA Variant Scaffold
  source 1..251: mol_type = other RNA
actggcgcttttatctgattactttgagagccatcaccagcgactatgtcgtagtgggtaaagctgcactatgggcgcagctcatgaggatcacccatgagctgacggtacaggccacatgaggatcacccatgtggtatagtgcagcatcaaagctgcattctagttgtggtttggccggcatggtcccagcctcctcgctggcgccggctgggcaacatgcttcggcatggcgaatgggactttttttt

SEQ ID NO: 9269 - RNA, 377 nt, synthetic construct
  misc_feature 1..377: note = gNA Variant Scaffold
  source 1..377: mol_type = other RNA
actggcgcttttatctgattactttgagagccatcaccagcgactatgtcgtagtgggtaaagctcacatgaggatcacccatgtgagcatcaaagctgcattctagttgtggtttcacaattattcttgagtgtagtctcgtcattcaccaaatctttgtttggtgcgcgcggccggcatggtcccagcctcctcgctggcgccggctgggcaacattccgaggggaccgtcccctcggtaatggcgaatgggacgtcgactgctaacaaagcccgaaaggaagctgagttggctgctgccaccgctgagcaataactagcataaccccttggggcctctaaacgggtcttgaggggttttttgctgatttttttt

SEQ ID NO: 9270 - RNA, 213 nt, synthetic construct
  misc_feature 1..213: note = gNA Variant Scaffold
  source 1..213: mol_type = other RNA
actggcgcttttatctgattactttgagagccatcaccagcgactatgtcgtagtgggtaaagctcacatgaggatcacccatgtgagcatcaaagctgcattctagttgtggtttatggccggcatggtcccagcctcctcgctggcgccggctgggcaacattccgaggggaccgccccctcggtaatggcgaatgggacccatttttttt

SEQ ID NO: 9271 - RNA, 212 nt, synthetic construct
  misc_feature 1..212: note = gNA Variant Scaffold
  source 1..212: mol_type = other RNA
actggcgcttttatctgattactttgagagccatcaccagcgactatgtcgtagtgggtaaagctcacatgaggatcacccatgtgagcatcaaagctgcattctagttgtggtttgtggccggcatggtccagcctactcgctggcgcgggctgggcaacattccgaggggacccgtccctcggtaatggcgaatgggacccatttttttt

SEQ ID NO: 9272 - RNA, 215 nt, synthetic construct
  misc_feature 1..215: note = gNA Variant Scaffold
  source 1..215: mol_type = other RNA
actggcgcttttatctgattactttgagagccatcaccagcgactatgtcgtagtgggtaaagctcacatgaggatcacccatgtgagcatcaaagctgcattctagttgtggtttgtggccggcatggccccagcctcctcgctggcgccggctgggcaacgatccgaggggactgtccctctcgagaatcggcaaatggggcccctttttttt

SEQ ID NO: 9273 - RNA, 224 nt, synthetic construct
  misc_feature 1..224: note = gNA Variant Scaffold
  source 1..224: mol_type = other RNA
actggcgcttttatctgattactttgagagccatcaccagcgactatgtcgtagtgggtaaagctcacatgaggatcacccatgtgagcatcaaagctgcattctagttgtggttttcgggtcggcatggcatctccacctccacctcctcgcggtccgacctgggcatccgaaggaggagcggacgtccactcggatggctaagggagagcccagtttttttt

SEQ ID NO: 9274 - RNA, 217 nt, synthetic construct
  misc_feature 1..217: note = gNA Variant Scaffold
  source 1..217: mol_type = other RNA
actggcgcttttatctgattactttgagagccatcaccagcgactatgtcgtagtgggtaaagctcacatgaggatcacccatgtgagcatcaaagctgcattctagttgtggttttcgggtcggcatggcatctccacctccccgtggtccgacctgggcatccgaaggaggacggacgtccactcggatggctaagggagtgccggctttttttt

SEQ ID NO: 9275 - RNA, 192 nt, synthetic construct
  misc_feature 1..192: note = gNA Variant Scaffold
  source 1..192: mol_type = other RNA
actggcgcttttatctgattactttgagagccatcaccagcgactatgtcgtagtgggtaaagctcacatgaggatcacccatgtgagcatcaaagctgcattctagttgtggtttggccggcatggtcccagcctcctcgctggcgccggctgggcaacatgcttcggcatggcgaatgggactttttttt

SEQ ID NO: 9276 - RNA, 163 nt, synthetic construct
  misc_feature 1..163: note = gNA Variant Scaffold
  source 1..163: mol_type = other RNA
actggcgcttttatctgattactttgagagccatcaccagcgactatgtcgtagtgggtaaagctgcactatgggcgcagcaaggagtttatatggaaacccttgctgacggtacaggccaaggagtttatatggaaacccttggtatagtgcagcatcaaag

SEQ ID NO: 9277 - RNA, 147 nt, synthetic construct
  misc_feature 1..147: note = gNA Variant Scaffold
  source 1..147: mol_type = other RNA
actggcgcttttatctgattactttgagagccatcaccagcgactatgtcgtagtgggtaaagctgcactatgggcgcagcgccctgaagaagggcgctgacggtacaggccgccctgaagaagggcggtatagtgcagcatcaaag

SEQ ID NO: 9278 - RNA, 173 nt, synthetic construct
  misc_feature 1..173: note = gNA Variant Scaffold
  source 1..173: mol_type = other RNA
actggcgcttttatctgattactttgagagccatcaccagcgactatgtcgtagtgggtaaagctgcactatgggcgcagcggctcgtgtagctcattagctccgagccgctgacggtacaggccggctcgtgtagctcattagctccgagccggtatagtgcagcatcaaag

SEQ ID NO: 9279 - RNA, 177 nt, synthetic construct
  misc_feature 1..177: note = gNA Variant Scaffold
  source 1..177: mol_type = other RNA
actggcgcttttatctgattactttgagagccatcaccagcgactatgtcgtagtgggtaaagctgcactatgggcgcagcccgtgtgcatccgcagtgtcggatccacgggctgacggtacaggccccgtgtgcatccgcagtgtcggatccacggggtatagtgcagcatcaaag

SEQ ID NO: 9280 - RNA, 161 nt, synthetic construct
  misc_feature 1..161: note = gNA Variant Scaffold
  source 1..161: mol_type = other RNA
actggcgcttttatctgattactttgagagccatcaccagcgactatgtcgtagtgggtaaagctgcactatgggcgcagcatccattgcactccggatagctgctgacggtacaggccatccattgcactccggatagctggtatagtgcagcatcaaag

SEQ ID NO: 9281 - RNA, 157 nt, synthetic construct
  misc_feature 1..157: note = gNA Variant Scaffold
  source 1..157: mol_type = other RNA
actggcgcttttatctgattactttgagagccatcaccagcgactatgtcgtagtgggtaaagctgcactatgggcgcagcatgcatgtctaagacagcatgctgacggtacaggccatgcatgtctaagacagcatggtatagtgcagcatcaaag

SEQ ID NO: 9282 - RNA, 162 nt, synthetic construct
  misc_feature 1..162: note = gNA Variant Scaffold
  source 1..162: mol_type = other RNA
actggcgcttttatctgattactttgagagccatcaccagcgactatgtcgtagtgggtaaagctgcactatgggcgcagcaaaacataaggaaaacctatgttctgacggtacaggccaaaacataaggaaaacctatgttggtatagtgcagcatcaaag

SEQ ID NO: 9283 - RNA, 175 nt, synthetic construct
  misc_feature 1..175: note = gNA Variant Scaffold
  source 1..175: mol_type = other RNA
actggcgcttctatctgattactctgagcgccatcaccagcgactatgtcgtagtgggtaaagccgcttacggactatgggcgcagcaaggagtttatatggaaacccttgctgacggtacaggccaaggagtttatatggaaacccttggtatagtccgtaagaggcatcagag

SEQ ID NO: 9284 - RNA, 159 nt, synthetic construct
  misc_feature 1..159: note = gNA Variant Scaffold
  source 1..159: mol_type = other RNA
actggcgcttctatctgattactctgagcgccatcaccagcgactatgtcgtagtgggtaaagccgcttacggactatgggcgcagcgccctgaagaagggcgctgacggtacaggccgccctgaagaagggcggtatagtccgtaagaggcatcagag

SEQ ID NO: 9285 - RNA, 185 nt, synthetic construct
  misc_feature 1..185: note = gNA Variant Scaffold
  source 1..185: mol_type = other RNA
actggcgcttctatctgattactctgagcgccatcaccagcgactatgtcgtagtgggtaaagccgcttacggactatgggcgcagcggctcgtgtagctcattagctccgagccgctgacggtacaggccggctcgtgtagctcattagctccgagccggtatagtccgtaagaggcatcagag

SEQ ID NO: 9286 - RNA, 189 nt, synthetic construct
  misc_feature 1..189: note = gNA Variant Scaffold
  source 1..189: mol_type = other RNA
actggcgcttctatctgattactctgagcgccatcaccagcgactatgtcgtagtgggtaaagccgcttacggactatgggcgcagcccgtgtgcatccgcagtgtcggatccacgggctgacggtacaggccccgtgtgcatccgcagtgtcggatccacggggtatagtccgtaagaggcatcagag

SEQ ID NO: 9287 - RNA, 173 nt, synthetic construct
  misc_feature 1..173: note = gNA Variant Scaffold
  source 1..173: mol_type = other RNA
actggcgcttctatctgattactctgagcgccatcaccagcgactatgtcgtagtgggtaaagccgcttacggactatgggcgcagcatccattgcactccggatagctgctgacggtacaggccatccattgcactccggatagctggtatagtccgtaagaggcatcagag

SEQ ID NO: 9288 - RNA, 169 nt, synthetic construct
  misc_feature 1..169: note = gNA Variant Scaffold
  source 1..169: mol_type = other RNA
actggcgcttctatctgattactctgagcgccatcaccagcgactatgtcgtagtgggtaaagccgcttacggactatgggcgcagcatgcatgtctaagacagcatgctgacggtacaggccatgcatgtctaagacagcatggtatagtccgtaagaggcatcagag

SEQ ID NO: 9289 - RNA, 175 nt, synthetic construct
  misc_feature 1..175: note = gNA Variant Scaffold
  source 1..175: mol_type = other RNA
actggcgcttctatctgattactctgagcgccatcaccagcgactatgtcgtagtgggtaaagccgcttacggactatgggcgcagcaaaacataaggaaaacctatgttgctgacggtacaggccaaaacataaggaaaacctatgttggtatagtccgtaagaggcatcagag

SEQ ID NO: 9290 - DNA, 27 bp, synthetic construct
  misc_feature 1..27: note = 5' cMyc NLS
  source 1..27: mol_type = other DNA
ccagcggccaaacgggtgaagctggac

SEQ ID NO: 9291 - DNA, 2931 bp, synthetic construct; identical to SEQ ID NO: 3703
  misc_feature 1..2931: note = CasX variant
  source 1..2931: mol_type = other DNA

SEQ ID NO: 9292 - DNA, 27 bp, synthetic construct
  misc_feature 1..27: note = 3' cMyc NLS
  source 1..27: mol_type = other DNA
cccgccgcgaagcgagtgaaactggac

SEQ ID NO: 9293 - DNA, 99 bp, synthetic construct
  misc_feature 1..99: note = Scaffold 235 (Rev Comp)
  source 1..99: mol_type = other DNA
ctctgatgcctcttacggaccgaagtccgtaagcggctttacccactacgacatagtcgctggtgatggcgctcagagtaatcagatagaagcgccagt

SEQ ID NO: 9294 - DNA, 20 bp, synthetic construct
  misc_feature 1..20: note = Spacer 12.7 Rev Comp)
  source 1..20: mol_type = other DNA
aaaccacaactagaatgcag

SEQ ID NO: 9295 - DNA, 4352 bp, synthetic construct
  misc_feature 1..4352: note = full AAV transgene
  source 1..4352: mol_type = other DNA
cctgcaggcagctgcgcgctcgctcgctcactgaggccgcccgggcgtcgggcgacctttggtcgcccggcctcagtgagcgagcgagcgcgcagagagggagtggccaactccatcactaggggttcctgcggcctctagactcgaggcgttggcctccgcgccgggttttggcgcctcccgcgggcgcccccctcctcacggcgagcgctgccacgtcagacgaagggcgcagcgagcgtcctgatccttccgcccggacgctcaggacagcggcccgctgctcataagactcggccttagaaccccagtatcagcagaaggacattttaggacgggacttgggtgactctagggcactggttttctttccagagagcggaacaggcgaggaaaagtagtcccttctcggcgattctgcggagggatctccgtggggcggtgaacgccgatgattatataaggacgcgccgggtgtggcacagctagttccgtcgcagccgggatttgggtcgcggttcttgtttgtggatcgctgtgatcgtcacttggtctctggctaactaccggtgccaccatggccccagcggccaaacgggtgaagctggactctagacaagagatcaagagaatcaacaagatcagaaggagactggtcaaggacagcaacacaaagaaggccggcaagacaggccccatgaaaaccctgctcgtcagagtgatgacccctgacctgagagagcggctggaaaacctgagaaagaagcccgagaacatccctcagcctatcagcaacaccagcagggccaacctgaacaagctgctgaccgactacaccgagatgaagaaagccatcctgcacgtgtactgggaagagttccagaaagaccccgtgggcctgatgagcagagttgctcagcctgccagcaagaagatcgaccagaacaagctgaagcccgagatggacgagaagggcaatctgaccacagccggctttgcctgctctcagtgtggccagcctctgttcgtgtacaagctggaacaggtgtccgagaaaggcaaggcctacaccaactacttcggcagatgtaacgtggccgagcacgagaagctgattctgctggcccagctgaaacctgagaaggactctgatgaggccgtgacctacagcctgggcaagtttggacagagagccctggacttctacagcatccacgtgaccaaagaaagcacacaccccgtgaagcccctggctcagatcgccggcaatagatacgcctctggacctgtgggcaaagccctgtccgatgcctgcatgggaacaatcgccagcttcctgagcaagtaccaggacatcatcatcgagcaccagaaggtggtcaagggcaaccagaagagactggaaagcctgagggagctggccggcaaagagaacctggaataccccagcgtgaccctgcctcctcagcctcacacaaaagaaggcgtggacgcctacaacgaagtgatcgccagagtgagaatgtgggtcaacctgaacctgtggcagaagctgaaactgtccagggacgacgccaagcctctgctgagactgaagggcttccctagcttccctctggtggaaagacaggccaatgaagtggattggtgggacatggtctgcaacgtgaagaagctgatcaacgagaagaaagaggatggcaaggttttctggcagaacctggccggctacaagagacaagaagccctgaggccttacctgagcagcgaagaggaccggaagaagggcaagaagttcgccagataccagctgggcgacctgctgctgcacctggaaaagaagcacggcgaggactggggcaaagtgtacgatgaggcctgggagagaatcgacaagaaggtggaaggcctgagcaagcacattaagctggaagaggaaagaaggagcgaggacgcccaatctaaagccgctctgaccgattggctgagagccaaggccagctttgtgatcgagggcctgaaagaggccgacaaggacgagttctgcagatgcgagctgaagctgcagaagtggtacggcgatctgagaggcaagcccttcgccattgaggccgagaacagcatcctggacatcagcggcttcagcaagcagtacaactgcgccttcatttggcagaaagacggcgtcaagaaactgaacctgtacctgatcatcaattacttcaaaggcggcaagctgcggttcaagaagatcaaacccgaggccttcgaggctaacagattctacaccgtgatcaacaaaaagtccggcgagatcgtgcccatggaagtgaacttcaacttcgacgaccccaacctgattatcctgcctctggccttcggcaagagacagggcagagagttcatctggaacgatctgctgagcctggaaaccggctctctgaagctggccaatggcagagtgatcgagaaaaccctgtacaacaggagaaccagacaggacgagcctgctctgtttgtggccctgaccttcgagagaagagaggtgctggacagcagcaacatcaagcccatgaacctgatcggcgtggaccggggcgagaatatccctgctgtgatcgccctgacagaccctgaaggatgcccactgagcagattcaaggactccctgggcaaccctacacacatcctgagaatcggcgagagctacaaagagaagcagaggacaatccaggccaagaaagaggtggaacagcgcagagccggcggatactctaggaagtacgccagcaaggccaagaatctggccgacgacatggtccgaaacaccgccagagatctgctgtactacgccgtgacacaggacgccatgctgatcttcgagaatctgagcagaggcttcggccggcagggcaagagaacctttatggccgagaggcagtacaccagaatggaagattggctcacagctaaactggcctacgagggactgagcaagacctacctgtccaaaacactggcccagtatacctccaagacctgcagcaattgcggcttcaccatcaccagcgccgactacgacagagtgctggaaaagctcaagaaaaccgccaccggctggatgaccaccatcaacggcaaagagctgaaggttgagggccagatcacctactacaacaggtacaagaggcagaacgtcgtgaaggatctgagcgtggaactggacagactgagcgaagagagcgtgaacaacgacatcagcagctggacaaagggcagatcaggcgaggctctgagcctgctgaagaagaggtttagccacagacctgtgcaagagaagttcgtgtgcctgaactgcggcttcgagacacacgccgatgaacaggctgccctgaacattgccagaagctggctgttcctgagaagccaagagtacaagaagtaccagaccaacaagaccaccggcaacaccgacaagagggcctttgtggaaacctggcagagcttctacagaaaaaagctgaaagaagtctggaagcccgccgtgggctcccccgccgcgaagcgagtgaaactggactaagaattcctagagctcgctgatcagcctcgactgtgccttctagttgccagccatctgttgtttgcccctcccccgtgccttccttgaccctggaaggtgccactcccactgtcctttcctaataaaatgaggaaattgcatcgcattgtctgagtaggtgtcattctattctggggggtggggtggggcaggacagcaagggggaggattgggaagagaatagcaggcatgctggggaggtaccgtgagggcctatttcccatgattccttcatatttgcatatacgatacaaggctgttagagagataattggaattaatttgactgtaaacacaaagatattagtacaaaatacgtgacgtagaaagtaataatttcttgggtagtttgcagttttaaaattatgttttaaaatggactatcatatgcttaccgtaacttgaaagtatttcgatttcttggctttatatatcttgtggaaaggacgaaacaccactggcgcttctatctgattactctgagcgccatcaccagcgactatgtcgtagtgggtaaagccgcttacggacttcggtccgtaagaggcatcagagaggggtcttcgagaagaccctttttggcggccgcaggaacccctagtgatggagttggccactccctctctgcgcgctcgctcgctcactgaggccgggcgaccaaaggtcgcccgacgcccgggctttgcccgggcggcctcagtgagcgagcgagcgcgcagctgcctgcagg

SEQ ID NO: 9296 - DNA, 4352 bp, synthetic construct
  misc_feature 1..4352: note = full AAV transgene
  source 1..4352: mol_type = other DNA
cctgcaggcagctgcgcgctcgctcgctcactgaggccgcccgggcgtcgggcgacctttggtcgcccggcctcagtgagcgagcgagcgcgcagagagggagtggccaactccatcactaggggttcctgcggcctctagactcgaggcgttggcctccgcgccgggttttggcgcctcccgcgggcgcccccctcctcacggcgagcgctgccacgtcagacgaagggcgcagcgagcgtcctgatccttccgcccggacgctcaggacagcggcccgctgctcataagactcggccttagaaccccagtatcagcagaaggacattttaggacgggacttgggtgactctagggcactggttttctttccagagagcggaacaggcgaggaaaagtagtcccttctcggcgattctgcggagggatctccgtggggcggtgaacgccgatgattatataaggacgcgccgggtgtggcacagctagttccgtcgcagccgggatttgggtcgcggttcttgtttgtggatcgctgtgatcgtcacttggtctctggctaactaccggtgccaccatggccccagcggccaaacgggtgaagctggactctagacaagagatcaagagaatcaacaagatcagaaggagactggtcaaggacagcaacacaaagaaggccggcaagacaggccccatgaaaaccctgctcgtcagagtgatgacccctgacctgagagagcggctggaaaacctgagaaagaagcccgagaacatccctcagcctatcagcaacaccagcagggccaacctgaacaagctgctgaccgactacaccgagatgaagaaagccatcctgcacgtgtactgggaagagttccagaaagaccccgtgggcctgatgagcagagttgctcagcctgccagcaagaagatcgaccagaacaagctgaagcccgagatggacgagaagggcaatctgaccacagccggctttgcctgctctcagtgtggccagcctctgttcgtgtacaagctggaacaggtgtccgagaaaggcaaggcctacaccaactacttcggcagatgtaacgtggccgagcacgagaagctgattctgctggcccagctgaaacctgagaaggactctgatgaggccgtgacctacagcctgggcaagtttggacagagagccctggacttctacagcatccacgtgaccaaagaaagcacacaccccgtgaagcccctggctcagatcgccggcaatagatacgcctctggacctgtgggcaaagccctgtccgatgcctgcatgggaacaatcgccagcttcctgagcaagtaccaggacatcatcatcgagcaccagaaggtggtcaagggcaaccagaagagactggaaagcctgagggagctggccggcaaagagaacctggaataccccagcgtgaccctgcctcctcagcctcacacaaaagaaggcgtggacgcctacaacgaagtgatcgccagagtgagaatgtgggtcaacctgaacctgtggcagaagctgaaactgtccagggacgacgccaagcctctgctgagactgaagggcttccctagcttccctctggtggaaagacaggccaatgaagtggattggtgggacatggtctgcaacgtgaagaagctgatcaacgagaagaaagaggatggcaaggttttctggcagaacctggccggctacaagagacaagaagccctgaggccttacctgagcagcgaagaggaccggaagaagggcaagaagttcgccagataccagctgggcgacctgctgctgcacctggaaaagaagcacggcgaggactggggcaaagtgtacgatgaggcctgggagagaatcgacaagaaggtggaaggcctgagcaagcacattaagctggaagaggaaagaaggagcgaggacgcccaatctaaagccgctctgaccgattggctgagagccaaggccagctttgtgatcgagggcctgaaagaggccgacaaggacgagttctgcagatgcgagctgaagctgcagaagtggtacggcgatctgagaggcaagcccttcgccattgaggccgagaacagcatcctggacatcagcggcttcagcaagcagtacaactgcgccttcatttggcagaaagacggcgtcaagaaactgaacctgtacctgatcatcaattacttcaaaggcggcaagctgcggttcaagaagatcaaacccgaggccttcgaggctaacagattctacaccgtgatcaacaaaaagtccggcgagatcgtgcccatggaagtgaacttcaacttcgacgaccccaacctgattatcctgcctctggccttcggcaagagacagggcagagagttcatctggaacgatctgctgagcctggaaaccggctctctgaagctggccaatggcagagtgatcgagaaaaccctgtacaacaggagaaccagacaggacgagcctgctctgtttgtggccctgaccttcgagagaagagaggtgctggacagcagcaacatcaagcccatgaacctgatcggcgtggaccggggcgagaatatccctgctgtgatcgccctgacagaccctgaaggatgcccactgagcagattcaaggactccctgggcaaccctacacacatcctgagaatcggcgagagctacaaagagaagcagaggacaatccaggccaagaaagaggtggaacagcgcagagccggcggatactctaggaagtacgccagcaaggccaagaatctggccgacgacatggtccgaaacaccgccagagatctgctgtactacgccgtgacacaggacgccatgctgatcttcgagaatctgagcagaggcttcggccggcagggcaagagaacctttatggccgagaggcagtacaccagaatggaagattggctcacagctaaactggcctacgagggactgagcaagacctacctgtccaaaacactggcccagtatacctccaagacctgcagcaattgcggcttcaccatcaccagcgccgactacgacagagtgctggaaaagctcaagaaaaccgccaccggctggatgaccaccatcaacggcaaagagctgaaggttgagggccagatcacctactacaacaggtacaagaggcagaacgtcgtgaaggatctgagcgtggaactggacagactgagcgaagagagcgtgaacaacgacatcagcagctggacaaagggcagatcaggcgaggctctgagcctgctgaagaagaggtttagccacagacctgtgcaagagaagttcgtgtgcctgaactgcggcttcgagacacacgccgatgaacaggctgccctgaacattgccagaagctggctgttcctgagaagccaagagtacaagaagtaccagaccaacaagaccaccggcaacaccgacaagagggcctttgtggaaacctggcagagcttctacagaaaaaagctgaaagaagtctggaagcccgccgtgggctcccccgccgcgaagcgagtgaaactggactaagaattcctagagctcgctgatcagcctcgactgtgccttctagttgccagccatctgttgtttgcccctcccccgtgccttccttgaccctggaaggtgccactcccactgtcctttcctaataaaatgaggaaattgcatcgcattgtctgagtaggtgtcattctattctggggggtggggtggggcaggacagcaagggggaggattgggaagagaatagcaggcatgctggggaggtaccgtgagggcctatttcccatgattccttcatatttgcatatacgatacaaggctgttagagagataattggaattaatttgactgtaaacacaaagatattagtacaaaatacgtgacgtagaaagtaataatttcttgggtagtttgcagttttaaaattatgttttaaaatggactatcatatgcttaccgtaacttgaaagtatttcgatttcttggctttatatatcttgtggaaaggacgaaacaccactggcgcttctatctgattactctgagcgccatcaccagcgactatgtcgtagtgggtaaagccgcttacggacttcggtccgtaagaggcatcagagctgcattctagttgtggttttttttggcggccgcaggaacccctagtgatggagttggccactccctctctgcgcgctcgctcgctcactgaggccgggcgaccaaaggtcgcccgacgcccgggctttgcccgggcggcctcagtgagcgagcgagcgcgcagctgcctgcagg

SEQ ID NO: 9297 - DNA, 4344 bp, synthetic construct
  misc_feature 1..4344: note = full AAV transgene
  source 1..4344: mol_type = other DNA
cctgcaggcagctgcgcgctcgctcgctcactgaggccgcccgggcgtcgggcgacctttggtcgcccggcctcagtgagcgagcgagcgcgcagagagggagtggccaactccatcactaggggttcctgcggcctctagactcgaggcgttggcctccgcgccgggttttggcgcctcccgcgggcgcccccctcctcacggcgagcgctgccacgtcagacgaagggcgcagcgagcgtcctgatccttccgcccggacgctcaggacagcggcccgctgctcataagactcggccttagaaccccagtatcagcagaaggacattttaggacgggacttgggtgactctagggcactggttttctttccagagagcggaacaggcgaggaaaagtagtcccttctcggcgattctgcggagggatctccgtggggcggtgaacgccgatgattatataaggacgcgccgggtgtggcacagctagttccgtcgcagccgggatttgggtcgcggttcttgtttgtggatcgctgtgatcgtcacttggtctctggctaactaccggtgccaccatggccccagcggccaaacgggtgaagctggactctagacaagagatcaagagaatcaacaagatcagaaggagactggtcaaggacagcaacacaaagaaggccggcaagacaggccccatgaaaaccctgctcgtcagagtgatgacccctgacctgagagagcggctggaaaacctgagaaagaagcccgagaacatccctcagcctatcagcaacaccagcagggccaacctgaacaagctgctgaccgactacaccgagatgaagaaagccatcctgcacgtgtactgggaagagttccagaaagaccccgtgggcctgatgagcagagttgctcagcctgccagcaagaagatcgaccagaacaagctgaagcccgagatggacgagaagggcaatctgaccacagccggctttgcctgctctcagtgtggccagcctctgttcgtgtacaagctggaacaggtgtccgagaaaggcaaggcctacaccaactacttcggcagatgtaacgtggccgagcacgagaagctgattctgctggcccagctgaaacctgagaaggactctgatgaggccgtgacctacagcctgggcaagtttggacagagagccctggacttctacagcatccacgtgaccaaagaaagcacacaccccgtgaagcccctggctcagatcgccggcaatagatacgcctctggacctgtgggcaaagccctgtccgatgcctgcatgggaacaatcgccagcttcctgagcaagtaccaggacatcatcatcgagcaccagaaggtggtcaagggcaaccagaagagactggaaagcctgagggagctggccggcaaagagaacctggaataccccagcgtgaccctgcctcctcagcctcacacaaaagaaggcgtggacgcctacaacgaagtgatcgccagagtgagaatgtgggtcaacctgaacctgtggcagaagctgaaactgtccagggacgacgccaagcctctgctgagactgaagggcttccctagcttccctctggtggaaagacaggccaatgaagtggattggtgggacatggtctgcaacgtgaagaagctgatcaacgagaagaaagaggatggcaaggttttctggcagaacctggccggctacaagagacaagaagccctgaggccttacctgagcagcgaagaggaccggaagaagggcaagaagttcgccagataccagctgggcgacctgctgctgcacctggaaaagaagcacggcgaggactggggcaaagtgtacgatgaggcctgggagagaatcgacaagaaggtggaaggcctgagcaagcacattaagctggaagaggaaagaaggagcgaggacgcccaatctaaagccgctctgaccgattggctgagagccaaggccagctttgtgatcgagggcctgaaagaggccgacaaggacgagttctgcagatgcgagctgaagctgcagaagtggtacggcgatctgagaggcaagcccttcgccattgaggccgagaacagcatcctggacatcagcggcttcagcaagcagtacaactgcgccttcatttggcagaaagacggcgtcaagaaactgaacctgtacctgatcatcaattacttcaaaggcggcaagctgcggttcaagaagatcaaacccgaggccttcgaggctaacagattctacaccgtgatcaacaaaaagtccggcgagatcgtgcccatggaagtgaacttcaacttcgacgaccccaacctgattatcctgcctctggccttcggcaagagacagggcagagagttcatctggaacgatctgctgagcctggaaaccggctctctgaagctggccaatggcagagtgatcgagaaaaccctgtacaacaggagaaccagacaggacgagcctgctctgtttgtggccctgaccttcgagagaagagaggtgctggacagcagcaacatcaagcccatgaacctgatcggcgtggaccggggcgagaatatccctgctgtgatcgccctgacagaccctgaaggatgcccactgagcagattcaaggactccctgggcaaccctacacacatcctgagaatcggcgagagctacaaagagaagcagaggacaatccaggccaagaaagaggtggaacagcgcagagccggcggatactctaggaagtacgccagcaaggccaagaatctggccgacgacatggtccgaaacaccgccagagatctgctgtactacgccgtgacacaggacgccatgctgatcttcgagaatctgagcagaggcttcggccggcagggcaagagaacctttatggccgagaggcagtacaccagaatggaagattggctcacagctaaactggcctacgagggactgagcaagacctacctgtccaaaacactggcccagtatacctccaagacctgcagcaattgcggcttcaccatcaccagcgccgactacgacagagtgctggaaaagctcaagaaaaccgccaccggctggatgaccaccatcaacggcaaagagctgaaggttgagggccagatcacctactacaacaggtacaagaggcagaacgtcgtgaaggatctgagcgtggaactggacagactgagcgaagagagcgtgaacaacgacatcagcagctggacaaagggcagatcaggcgaggctctgagcctgctgaagaagaggtttagccacagacctgtgcaagagaagttcgtgtgcctgaactgcggcttcgagacacacgccgatgaacaggctgccctgaacattgccagaagctggctgttcctgagaagccaagagtacaagaagtaccagaccaacaagaccaccggcaacaccgacaagagggcctttgtggaaacctggcagagcttctacagaaaaaagctgaaagaagtctggaagcccgccgtgggctcccccgccgcgaagcgagtgaaactggactaagaattcctagagctcgctgatcagcctcgactgtgccttctagttgccagccatctgttgtttgcccctcccccgtgccttccttgaccctggaaggtgccactcccactgtcctttcctaataaaatgaggaaattgcatcgcattgtctgagtaggtgtcattctattctggggggtggggtggggcaggacagcaagggggaggattgggaagagaatagcaggcatgctggggaggtaccaaaccacaactagaatgcagctctgatgcctcttacggaccgaagtccgtaagcggctttacccactacgacatagtcgctggtgatggcgctcagagtaatcagatagaagcgccagtggtgtttcgtcctttccacaagatatataaagccaagaaatcgaaatactttcaagttacggtaagcatatgatagtccattttaaaacataattttaaaactgcaaactacccaagaaattattactttctacgtcacgtattttgtactaatatctttgtgtttacagtcaaattaattccaattatctctctaacagccttgtatcgtatatgcaaatatgaaggaatcatgggaaataggccctcgcggccgcaggaacccctagtgatggagttggccactccctctctgcgcgctcgctcgctcactgaggccgggcgaccaaaggtcgcccgacgcccgggctttgcccgggcggcctcagtgagcgagcgagcgcgcagctgcctgcagg

SEQ ID NO: 9298 - DNA, 4354 bp, synthetic construct
  misc_feature 1..4354: note = full AAV transgene
  source 1..4354: mol_type = other DNA
cctgcaggcagctgcgcgctcgctcgctcactgaggccgcccgggcgtcgggcgacctttggtcgcccggcctcagtgagcgagcgagcgcgcagagagggagtggccaactccatcactaggggttcctgcggcctctgagggcctatttcccatgattccttcatatttgcatatacgatacaaggctgttagagagataattggaattaatttgactgtaaacacaaagatattagtacaaaatacgtgacgtagaaagtaataatttcttgggtagtttgcagttttaaaattatgttttaaaatggactatcatatgcttaccgtaacttgaaagtatttcgatttcttggctttatatatcttgtggaaaggacgaaacaccactggcgcttctatctgattactctgagcgccatcaccagcgactatgtcgtagtgggtaaagccgcttacggacttcggtccgtaagaggcatcagagaggggtcttcgagaagacccttttttttgcctcgaggcgttggcctccgcgccgggttttggcgcctcccgcgggcgcccccctcctcacggcgagcgctgccacgtcagacgaagggcgcagcgagcgtcctgatccttccgcccggacgctcaggacagcggcccgctgctcataagactcggccttagaaccccagtatcagcagaaggacattttaggacgggacttgggtgactctagggcactggttttctttccagagagcggaacaggcgaggaaaagtagtcccttctcggcgattctgcggagggatctccgtggggcggtgaacgccgatgattatataaggacgcgccgggtgtggcacagctagttccgtcgcagccgggatttgggtcgcggttcttgtttgtggatcgctgtgatcgtcacttggtctctggctaactaccggtgccaccatggccccagcggccaaacgggtgaagctggactctagacaagagatcaagagaatcaacaagatcagaaggagactggtcaaggacagcaacacaaagaaggccggcaagacaggccccatgaaaaccctgctcgtcagagtgatgacccctgacctgagagagcggctggaaaacctgagaaagaagcccgagaacatccctcagcctatcagcaacaccagcagggccaacctgaacaagctgctgaccgactacaccgagatgaagaaagccatcctgcacgtgtactgggaagagttccagaaagaccccgtgggcctgatgagcagagttgctcagcctgccagcaagaagatcgaccagaacaagctgaagcccgagatggacgagaagggcaatctgaccacagccggctttgcctgctctcagtgtggccagcctctgttcgtgtacaagctggaacaggtgtccgagaaaggcaaggcctacaccaactacttcggcagatgtaacgtggccgagcacgagaagctgattctgctggcccagctgaaacctgagaaggactctgatgaggccgtgacctacagcctgggcaagtttggacagagagccctggacttctacagcatccacgtgaccaaagaaagcacacaccccgtgaagcccctggctcagatcgccggcaatagatacgcctctggacctgtgggcaaagccctgtccgatgcctgcatgggaacaatcgccagcttcctgagcaagtaccaggacatcatcatcgagcaccagaaggtggtcaagggcaaccagaagagactggaaagcctgagggagctggccggcaaagagaacctggaataccccagcgtgaccctgcctcctcagcctcacacaaaagaaggcgtggacgcctacaacgaagtgatcgccagagtgagaatgtgggtcaacctgaacctgtggcagaagctgaaactgtccagggacgacgccaagcctctgctgagactgaagggcttccctagcttccctctggtggaaagacaggccaatgaagtggattggtgggacatggtctgcaacgtgaagaagctgatcaacgagaagaaagaggatggcaaggttttctggcagaacctggccggctacaagagacaagaagccctgaggccttacctgagcagcgaagaggaccggaagaagggcaagaagttcgccagataccagctgggcgacctgctgctgcacctggaaaagaagcacggcgaggactggggcaaagtgtacgatgaggcctgggagagaatcgacaagaaggtggaaggcctgagcaagcacattaagctggaagaggaaagaaggagcgaggacgcccaatctaaagccgctctgaccgattggctgagagccaaggccagctttgtgatcgagggcctgaaagaggccgacaaggacgagttctgcagatgcgagctgaagctgcagaagtggtacggcgatctgagaggcaagcccttcgccattgaggccgagaacagcatcctggacatcagcggcttcagcaagcagtacaactgcgccttcatttggcagaaagacggcgtcaagaaactgaacctgtacctgatcatcaattacttcaaaggcggcaagctgcggttcaagaagatcaaacccgaggccttcgaggctaacagattctacaccgtgatcaacaaaaagtccggcgagatcgtgcccatggaagtgaacttcaacttcgacgaccccaacctgattatcctgcctctggccttcggcaagagacagggcagagagttcatctggaacgatctgctgagcctggaaaccggctctctgaagctggccaatggcagagtgatcgagaaaaccctgtacaacaggagaaccagacaggacgagcctgctctgtttgtggccctgaccttcgagagaagagaggtgctggacagcagcaacatcaagcccatgaacctgatcggcgtggaccggggcgagaatatccctgctgtgatcgccctgacagaccctgaaggatgcccactgagcagattcaaggactccctgggcaaccctacacacatcctgagaatcggcgagagctacaaagagaagcagaggacaatccaggccaagaaagaggtggaacagcgcagagccggcggatactctaggaagtacgccagcaaggccaagaatctggccgacgacatggtccgaaacaccgccagagatctgctgtactacgccgtgacacaggacgccatgctgatcttcgagaatctgagcagaggcttcggccggcagggcaagagaacctttatggccgagaggcagtacaccagaatggaagattggctcacagctaaactggcctacgagggactgagcaagacctacctgtccaaaacactggcccagtatacctccaagacctgcagcaattgcggcttcaccatcaccagcgccgactacgacagagtgctggaaaagctcaagaaaaccgccaccggctggatgaccaccatcaacggcaaagagctgaaggttgagggccagatcacctactacaacaggtacaagaggcagaacgtcgtgaaggatctgagcgtggaactggacagactgagcgaagagagcgtgaacaacgacatcagcagctggacaaagggcagatcaggcgaggctctgagcctgctgaagaagaggtttagccacagacctgtgcaagagaagttcgtgtgcctgaactgcggcttcgagacacacgccgatgaacaggctgccctgaacattgccagaagctggctgttcctgagaagccaagagtacaagaagtaccagaccaacaagaccaccggcaacaccgacaagagggcctttgtggaaacctggcagagcttctacagaaaaaagctgaaagaagtctggaagcccgccgtgggctcccccgccgcgaagcgagtgaaactggactaagaattcctagagctcgctgatcagcctcgactgtgccttctagttgccagccatctgttgtttgcccctcccccgtgccttccttgaccctggaaggtgccactcccactgtcctttcctaataaaatgaggaaattgcatcgcattgtctgagtaggtgtcattctattctggggggtggggtggggcaggacagcaagggggaggattgggaagagaatagcaggcatgctggggaggtaccgtggcggccgcaggaacccctagtgatggagttggccactccctctctgcgcgctcgctcgctcactgaggccgggcgaccaaaggtcgcccgacgcccgggctttgcccgggcggcctcagtgagcgagcgagcgcgcagctgcctgcagg

SEQ ID NO: 9299 - DNA, 4354 bp, synthetic construct
  misc_feature 1..4354: note = full AAV transgene
  source 1..4354: mol_type = other DNA
cctgcaggcagctgcgcgctcgctcgctcactgaggccgcccgggcgtcgggcgacctttggtcgcccggcctcagtgagcgagcgagcgcgcagagagggagtggccaactccatcactaggggttcctgcggcctctgagggcctatttcccatgattccttcatatttgcatatacgatacaaggctgttagagagataattggaattaatttgactgtaaacacaaagatattagtacaaaatacgtgacgtagaaagtaataatttcttgggtagtttgcagttttaaaattatgttttaaaatggactatcatatgcttaccgtaacttgaaagtatttcgatttcttggctttatatatcttgtggaaaggacgaaacaccactggcgcttctatctgattactctgagcgccatcaccagcgactatgtcgtagtgggtaaagccgcttacggacttcggtccgtaagaggcatcagagctgcattctagttgtggtttttttttttgcctcgaggcgttggcctccgcgccgggttttggcgcctcccgcgggcgcccccctcctcacggcgagcgctgccacgtcagacgaagggcgcagcgagcgtcctgatccttccgcccggacgctcaggacagcggcccgctgctcataagactcggccttagaaccccagtatcagcagaaggacattttaggacgggacttgggtgactctagggcactggttttctttccagagagcggaacaggcgaggaaaagtagtcccttctcggcgattctgcggagggatctccgtggggcggtgaacgccgatgattatataaggacgcgccgggtgtggcacagctagttccgtcgcagccgggatttgggtcgcggttcttgtttgtggatcgctgtgatcgtcacttggtctctggctaactaccggtgccaccatggccccagcggccaaacgggtgaagctggactctagacaagagatcaagagaatcaacaagatcagaaggagactggtcaaggacagcaacacaaagaaggccggcaagacaggccccatgaaaaccctgctcgtcagagtgatgacccctgacctgagagagcggctggaaaacctgagaaagaagcccgagaacatccctcagcctatcagcaacaccagcagggccaacctgaacaagctgctgaccgactacaccgagatgaagaaagccatcctgcacgtgtactgggaagagttccagaaagaccccgtgggcctgatgagcagagttgctcagcctgccagcaagaagatcgaccagaacaagctgaagcccgagatggacgagaagggcaatctgaccacagccggctttgcctgctctcagtgtggccagcctctgttcgtgtacaagctggaacaggtgtccgagaaaggcaaggcctacaccaactacttcggcagatgtaacgtggccgagcacgagaagctgattctgctggcccagctgaaacctgagaaggactctgatgaggccgtgacctacagcctgggcaagtttggacagagagccctggacttctacagcatccacgtgaccaaagaaagcacacaccccgtgaagcccctggctcagatcgccggcaatagatacgcctctggacctgtgggcaaagccctgtccgatgcctgcatgggaacaatcgccagcttcctgagcaagtaccaggacatcatcatcgagcaccagaaggtggtcaagggcaaccagaagagactggaaagcctgagggagctggccggcaaagagaacctggaataccccagcgtgaccctgcctcctcagcctcacacaaaagaaggcgtggacgcctacaacgaagtgatcgccagagtgagaatgtgggtcaacctgaacctgtggcagaagctgaaactgtccagggacgacgccaagcctctgctgagactgaagggcttccctagcttccctctggtggaaagacaggccaatgaagtggattggtgggacatggtctgcaacgtgaagaagctgatcaacgagaagaaagaggatggcaaggttttctggcagaacctggccggctacaagagacaagaagccctgaggccttacctgagcagcgaagaggaccggaagaagggcaagaagttcgccagataccagctgggcgacctgctgctgcacctggaaaagaagcacggcgaggactggggcaaagtgtacgatgaggcctgggagagaatcgacaagaaggtggaaggcctgagcaagcacattaagctggaagaggaaagaaggagcgaggacgcccaatctaaagccgctctgaccgattggctgagagccaaggccagctttgtgatcgagggcctgaaagaggccgacaaggacgagttctgcagatgcgagctgaagctgcagaagtggtacggcgatctgagaggcaagcccttcgccattgaggccgagaacagcatcctggacatcagcggcttcagcaagcagtacaactgcgccttcatttggcagaaagacggcgtcaagaaactgaacctgtacctgatcatcaattacttcaaaggcggcaagctgcggttcaagaagatcaaacccgaggccttcgaggctaacagattctacaccgtgatcaacaaaaagtccggcgagatcgtgcccatggaagtgaacttcaacttcgacgaccccaacctgattatcctgcctctggccttcggcaagagacagggcagagagttcatctggaacgatctgctgagcctggaaaccggctctctgaagctggccaatggcagagtgatcgagaaaaccctgtacaacaggagaaccagacaggacgagcctgctctgtttgtggccctgaccttcgagagaagagaggtgctggacagcagcaacatcaagcccatgaacctgatcggcgtggaccggggcgagaatatccctgctgtgatcgccctgacagaccctgaaggatgcccactgagcagattcaaggactccctgggcaaccctacacacatcctgagaatcggcgagagctacaaagagaagcagaggacaatccaggccaagaaagaggtggaacagcgcagagccggcggatactctaggaagtacgccagcaaggccaagaatctggccgacgacatggtccgaaacaccgccagagatctgctgtactacgccgtgacacaggacgccatgctgatcttcgagaatctgagcagaggcttcggccggcagggcaagagaacctttatggccgagaggcagtacaccagaatggaagattggctcacagctaaactggcctacgagggactgagcaagacctacctgtccaaaacactggcccagtatacctccaagacctgcagcaattgcggcttcaccatcaccagcgccgactacgacagagtgctggaaaagctcaagaaaaccgccaccggctggatgaccaccatcaacggcaaagagctgaaggttgagggccagatcacctactacaacaggtacaagaggcagaacgtcgtgaaggatctgagcgtggaactggacagactgagcgaagagagcgtgaacaacgacatcagcagctggacaaagggcagatcaggcgaggctctgagcctgctgaagaagaggtttagccacagacctgtgcaagagaagttcgtgtgcctgaactgcggcttcgagacacacgccgatgaacaggctgccctgaacattgccagaagctggctgttcctgagaagccaagagtacaagaagtaccagaccaacaagaccaccggcaacaccgacaagagggcctttgtggaaacctggcagagcttctacagaaaaaagctgaaagaagtctggaagcccgccgtgggctcccccgccgcgaagcgagtgaaactggactaagaattcctagagctcgctgatcagcctcgactgtgccttctagttgccagccatctgttgtttgcccctcccccgtgccttccttgaccctggaaggtgccactcccactgtcctttcctaataaaatgaggaaattgcatcgcattgtctgagtaggtgtcattctattctggggggtggggtggggcaggacagcaagggggaggattgggaagagaatagcaggcatgctggggaggtaccgtggcggccgcaggaacccctagtgatggagttggccactccctctctgcgcgctcgctcgctcactgaggccgggcgaccaaaggtcgcccgacgcccgggctttgcccgggcggcctcagtgagcgagcgagcgcgcagctgcctgcagg

SEQ ID NO: 9300 - DNA, 4364 bp, synthetic construct
  misc_feature 1..4364: note = full AAV transgene
  source 1..4364: mol_type = other DNA
cctgcaggcagctgcgcgctcgctcgctcactgaggccgcccgggcgtcgggcgacctttggtcgcccggcctcagtgagcgagcgagcgcgcagagagggagtggccaactccatcactaggggttcctgcggcctctagacaagcttgcaaaaaaaaaaaccacaactagaatgcagctctgatgcctcttacggaccgaagtccgtaagcggctttacccactacgacatagtcgctggtgatggcgctcagagtaatcagatagaagcgccagtggtgtttcgtcctttccacaagatatataaagccaagaaatcgaaatactttcaagttacggtaagcatatgatagtccattttaaaacataattttaaaactgcaaactacccaagaaattattactttctacgtcacgtattttgtactaatatctttgtgtttacagtcaaattaattccaattatctctctaacagccttgtatcgtatatgcaaatatgaaggaatcatgggaaataggccctcctcgaggcgttggcctccgcgccgggttttggcgcctcccgcgggcgcccccctcctcacggcgagcgctgccacgtcagacgaagggcgcagcgagcgtcctgatccttccgcccggacgctcaggacagcggcccgctgctcataagactcggccttagaaccccagtatcagcagaaggacattttaggacgggacttgggtgactctagggcactggttttctttccagagagcggaacaggcgaggaaaagtagtcccttctcggcgattctgcggagggatctccgtggggcggtgaacgccgatgattatataaggacgcgccgggtgtggcacagctagttccgtcgcagccgggatttgggtcgcggttcttgtttgtggatcgctgtgatcgtcacttggtctctggctaactaccggtgccaccatggccccagcggccaaacgggtgaagctggactctagacaagagatcaagagaatcaacaagatcagaaggagactggtcaaggacagcaacacaaagaaggccggcaagacaggccccatgaaaaccctgctcgtcagagtgatgacccctgacctgagagagcggctggaaaacctgagaaagaagcccgagaacatccctcagcctatcagcaacaccagcagggccaacctgaacaagctgctgaccgactacaccgagatgaagaaagccatcctgcacgtgtactgggaagagttccagaaagaccccgtgggcctgatgagcagagttgctcagcctgccagcaagaagatcgaccagaacaagctgaagcccgagatggacgagaagggcaatctgaccacagccggctttgcctgctctcagtgtggccagcctctgttcgtgtacaagctggaacaggtgtccgagaaaggcaaggcctacaccaactacttcggcagatgtaacgtggccgagcacgagaagctgattctgctggcccagctgaaacctgagaaggactctgatgaggccgtgacctacagcctgggcaagtttggacagagagccctggacttctacagcatccacgtgaccaaagaaagcacacaccccgtgaagcccctggctcagatcgccggcaatagatacgcctctggacctgtgggcaaagccctgtccgatgcctgcatgggaacaatcgccagcttcctgagcaagtaccaggacatcatcatcgagcaccagaaggtggtcaagggcaaccagaagagactggaaagcctgagggagctggccggcaaagagaacctggaataccccagcgtgaccctgcctcctcagcctcacacaaaagaaggcgtggacgcctacaacgaagtgatcgccagagtgagaatgtgggtcaacctgaacctgtggcagaagctgaaactgtccagggacgacgccaagcctctgctgagactgaagggcttccctagcttccctctggtggaaagacaggccaatgaagtggattggtgggacatggtctgcaacgtgaagaagctgatcaacgagaagaaagaggatggcaaggttttctggcagaacctggccggctacaagagacaagaagccctgaggccttacctgagcagcgaagaggaccggaagaagggcaagaagttcgccagataccagctgggcgacctgctgctgcacctggaaaagaagcacggcgaggactggggcaaagtgtacgatgaggcctgggagagaatcgacaagaaggtggaaggcctgagcaagcacattaagctggaagaggaaagaaggagcgaggacgcccaatctaaagccgctctgaccgattggctgagagccaaggccagctttgtgatcgagggcctgaaagaggccgacaaggacgagttctgcagatgcgagctgaagctgcagaagtggtacggcgatctgagaggcaagcccttcgccattgaggccgagaacagcatcctggacatcagcggcttcagcaagcagtacaactgcgccttcatttggcagaaagacggcgtcaagaaactgaacctgtacctgatcatcaattacttcaaaggcggcaagctgcggttcaagaagatcaaacccgaggccttcgaggctaacagattctacaccgtgatcaacaaaaagtccggcgagatcgtgcccatggaagtgaacttcaacttcgacgaccccaacctgattatcctgcctctggccttcggcaagagacagggcagagagttcatctggaacgatctgctgagcctggaaaccggctctctgaagctggccaatggcagagtgatcgagaaaaccctgtacaacaggagaaccagacaggacgagcctgctctgtttgtggccctgaccttcgagagaagagaggtgctggacagcagcaacatcaagcccatgaacctgatcggcgtggaccggggcgagaatatccctgctgtgatcgccctgacagaccctgaaggatgcccactgagcagattcaaggactccctgggcaaccctacacacatcctgagaatcggcgagagctacaaagagaagcagaggacaatccaggccaagaaagaggtggaacagcgcagagccggcggatactctaggaagtacgccagcaaggccaagaatctggccgacgacatggtccgaaacaccgccagagatctgctgtactacgccgtgacacaggacgccatgctgatcttcgagaatctgagcagaggcttcggccggcagggcaagagaacctttatggccgagaggcagtacaccagaatggaagattggctcacagctaaactggcctacgagggactgagcaagacctacctgtccaaaacactggcccagtatacctccaagacctgcagcaattgcggcttcaccatcaccagcgccgactacgacagagtgctggaaaagctcaagaaaaccgccaccggctggatgaccaccatcaacggcaaagagctgaaggttgagggccagatcacctactacaacaggtacaagaggcagaacgtcgtgaaggatctgagcgtggaactggacagactgagcgaagagagcgtgaacaacgacatcagcagctggacaaagggcagatcaggcgaggctctgagcctgctgaagaagaggtttagccacagacctgtgcaagagaagttcgtgtgcctgaactgcggcttcgagacacacgccgatgaacaggctgccctgaacattgccagaagctggctgttcctgagaagccaagagtacaagaagtaccagaccaacaagaccaccggcaacaccgacaagagggcctttgtggaaacctggcagagcttctacagaaaaaagctgaaagaagtctggaagcccgccgtgggctcccccgccgcgaagcgagtgaaactggactaagaattcctagagctcgctgatcagcctcgactgtgccttctagttgccagccatctgttgtttgcccctcccccgtgccttccttgaccctggaaggtgccactcccactgtcctttcctaataaaatgaggaaattgcatcgcattgtctgagtaggtgtcattctattctggggggtggggtggggcaggacagcaagggggaggattgggaagagaatagcaggcatgctggggaggtaccgtggcggccgcaggaacccctagtgatggagttggccactccctctctgcgcgctcgctcgctcactgaggccgggcgaccaaaggtcgcccgacgcccgggctttgcccgggcggcctcagtgagcgagcgagcgcgcagctgcctgcagg

SEQ ID NO: 9301 - DNA, 584 bp, synthetic construct; identical to SEQ ID NO: 3532
  misc_feature 1..584: note = CMV enhancer and promoter
  source 1..584: mol_type = other DNA

SEQ ID NO: 9302 - DNA, 18 bp, synthetic construct
  misc_feature 1..18: note = buffer sequence
  source 1..18: mol_type = other DNA
ctctggctaactaccggt

SEQ ID NO: 9303-9304 - skipped (2 entries)

SEQ ID NO: 9305 - DNA, 21 bp, synthetic construct
  misc_feature 1..21: note = SV40 NLS
  source 1..21: mol_type = other DNA
ccaaagaagaagcggaaggtc

SEQ ID NO: 9306-9307 - skipped (2 entries)

SEQ ID NO: 9308 - DNA, 21 bp, synthetic construct
  misc_feature 1..21: note = SV40 NLS
  source 1..21: mol_type = other DNA
ccaaaaaagaagagaaaggta

SEQ ID NO: 9309 - DNA, 27 bp, synthetic construct
  misc_feature 1..27: note = HA Tag
  source 1..27: mol_type = other DNA
tacccatatgatgtccctgactacgct

SEQ ID NO: 9310 - skipped

SEQ ID NO: 9311 - DNA, 89 bp, synthetic construct; identical to SEQ ID NO: 3631
  misc_feature 1..89: note = gRNA scaffold 174
  source 1..89: mol_type = other DNA

SEQ ID NO: 9312 - DNA, 20 bp, synthetic construct
  misc_feature 1..20: note = 20.7 spacer
  source 1..20: mol_type = other DNA
cggctacaaggacccttcga

SEQ ID NO: 9313 - DNA, 20 bp, synthetic construct
  misc_feature 1..20: note = 20.11 spacer
  source 1..20: mol_type = other DNA
caggcctgcagtttgcccat

SEQ ID NO: 9314 - DNA, 18 bp, synthetic construct
  misc_feature 1..18: note = NT spacer
  source 1..18: mol_type = other DNA
gggtcttcgagaagaccc

SEQ ID NO: 9315-9316 - skipped (2 entries)

SEQ ID NO: 9317 - DNA, 20 bp, synthetic construct
  misc_feature 1..20: note = 35.2 spacer
  source 1..20: mol_type = other DNA
agaagatgggcgggagtctt

SEQ ID NO: 9318 - DNA, 20 bp, synthetic construct
  misc_feature 1..20: note = 0.0 spacer
  source 1..20: mol_type = other DNA
cgagacgtaattacgtctcg

SEQ ID NO: 9319 - DNA, 3006 bp, synthetic construct; identical to SEQ ID NO: 3747
  misc_feature 1..3006: note = CasX variant
  source 1..3006: mol_type = other DNA

SEQ ID NO: 9320 - DNA, 2931 bp, synthetic construct
  source 1..2931: mol_type = other DNA
caagagatcaagagaatcaacaagatcagaaggagactggtcaaggacagcaacacaaagaaggccggcaagacaggccccatgaaaaccctgctcgtcagagtgatgacccctgacctgagagagcggctggaaaacctgagaaagaagcccgagaacatccctcagcctatcagcaacaccagcagggccaacctgaacaagctgctgaccgactacaccgagatgaagaaagccatcctgcacgtgtactgggaagagttccagaaagaccccgtgggcctgatgagcagagttgctcagcctgccagcaagaagatcgaccagaacaagctgaagcccgagatggacgagaagggcaatctgaccacagccggctttgcctgctctcagtgtggccagcctctgttcgtgtacaagctggaacaggtgtccgagaaaggcaaggcctacaccaactacttcggcagatgtaacgtggccgagcacgagaagctgattctgctggcccagctgaaacctgagaaggactctgatgaggccgtgacctacagcctgggcaagtttggacagagagccctggacttctacagcatccacgtgaccaaagaaagcacacaccccgtgaagcccctggctcagatcgccggcaatagatacgcctctggacctgtgggcaaagccctgtccgatgcctgcatgggaacaatcgccagcttcctgagcaagtaccaggacatcatcatcgagcaccagaaggtggtcaagggcaaccagaagagactggaaagcctgagggagctggccggcaaagagaacctggaataccccagcgtgaccctgcctcctcagcctcacacaaaagaaggcgtggacgcctacaacgaagtgatcgccagagtgagaatgtgggtcaacctgaacctgtggcagaagctgaaactgtccagggacgacgccaagcctctgctgagactgaagggcttccctagcttccctctggtggaaagacaggccaatgaagtggattggtgggacatggtctgcaacgtgaagaagctgatcaacgagaagaaagaggatggcaaggttttctggcagaacctggccggctacaagagacaagaagccctgaggccttacctgagcagcgaagaggaccggaagaagggcaagaagttcgccagataccagctgggcgacctgctgctgcacctggaaaagaagcacggcgaggactggggcaaagtgtacgatgaggcctgggagagaatcgacaagaaggtggaaggcctgagcaagcacattaagctggaagaggaaagaaggagcgaggacgcccaatctaaagccgctctgaccgattggctgagagccaaggccagctttgtgatcgagggcctgaaagaggccgacaaggacgagttctgcagatgcgagctgaagctgcagaagtggtacggcgatctgagaggcaagcccttcgccattgaggccgagaacagcatcctggacatcagcggcttcagcaagcagtacaactgcgccttcatttggcagaaagacggcgtcaagaaactgaacctgtacctgatcatcaattacttcaaaggcggcaagctgcggttcaagaagatcaaacccgaggccttcgaggctaacagattctacaccgtgatcaacaaaaagtccggcgagatcgtgcccatggaagtgaacttcaacttcgacgaccccaacctgattatcctgcctctggccttcggcaagagacagggcagagagttcatctggaacgatctgctgagcctggaaaccggctctctgaagctggccaatggcagagtgatcgagaaaaccctgtacaacaggagaaccagacaggacgagcctgctctgtttgtggccctgaccttcgagagaagagaggtgctggacagcagcaacatcaagcccatgaacctgatcggcgtggaccggggcgagaatatccctgctgtgatcgccctgacagaccctgaaggatgcccactgagcagattcaaggactccctgggcaaccctacacacatcctgagaatcggcgagagctacaaagagaagcagaggacaatccaggccaagaaagaggtggaacagagaagagccggcggatactctaggaagtacgccagcaaggccaagaatctggccgacgacatggtccgaaacaccgccagagatctgctgtactacgccgtgacacaggacgccatgctgatcttcgagaatctgagcagaggcttcggccggcagggcaagagaacctttatggccgagaggcagtacaccagaatggaagattggctcacagctaaactggcctacgagggactgagcaagacctacctgtccaaaacactggcccagtatacctccaagacctgcagcaattgcggcttcaccatcaccagcgccgactacgacagagtgctggaaaagctcaagaaaaccgccaccggctggatgaccaccatcaacggcaaagagctgaaggttgagggccagatcacctactacaacaggtacaagaggcagaacgtcgtgaaggatctgagcgtggaactggacagactgagcgaagagagcgtgaacaacgacatcagcagctggacaaagggcagatcaggcgaggctctgagcctgctgaagaagaggtttagccacagacctgtgcaagagaagttcgtgtgcctgaactgcggcttcgagacacacgccgatgaacaggctgccctgaacattgccagaagctggctgttcctgagaagccaagagtacaagaagtaccagaccaacaagaccaccggcaacaccgacaagagggcctttgtggaaacctggcagagcttctacagaaaaaagctgaaagaagtctggaagcccgccgtg

SEQ ID NO: 9321 - DNA, 2934 bp, synthetic construct
  source 1..2934: mol_type = other DNA
caagagatcaagagaatcaacaagatcagaaggagactggtcaaggacagcaacacaaagaaggccggcaagacaggccccatgaaaaccctgctcgtcagagtgatgacccctgacctgagagagcggctggaaaacctgagaaagaagcccgagaacatccctcagcctatcagcaacaccagcagggccaacctgaacaagctgctgaccgactacaccgagatgaagaaagccatcctgcacgtgtactgggaagagttccagaaagaccccgtgggcctgatgagcagagttgctcagcctgccagcaagaagatcgaccagaacaagctgaagcccgagatggacgagaagggcaatctgaccacagccggctttgcctgctctcagtgtggccagcctctgttcgtgtacaagctggaacaggtgtccgagaaaggcaaggcctacaccaactacttcggcagatgtaacgtggccgagcacgagaagctgattctgctggcccagctgaaacctgagaaggactctgatgaggccgtgacctacagcctgggcaagtttggacagagagccctggacttctacagcatccacgtgaccaaagaaagcacacaccccgtgaagcccctggctcagatcgccggcaatagatacgcctctggacctgtgggcaaagccctgtccgatgcctgcatgggaacaatcgccagcttcctgagcaagtaccaggacatcatcatcgagcaccagaaggtggtcaagggcaaccagaagagactggaaagcctgagggagctggccggcaaagagaacctggaataccccagcgtgaccctgcctcctcagcctcacacaaaagaaggcgtggacgcctacaacgaagtgatcgccagagtgagaatgtgggtcaacctgaacctgtggcagaagctgaaactgtccagggacgacgccaagcctctgctgagactgaagggcttccctagcttccctctggtggaaagacaggccaatgaagtggattggtgggacatggtctgcaacgtgaagaagctgatcaacgagaagaaagaggatggcaaggttttctggcagaacctggccggctacaagagacaagaagccctgaggccttacctgagcagcgaagaggaccggaagaagggcaagaagttcgccagataccagctgggcgacctgctgctgcacctggaaaagaagcacggcgaggactggggcaaagtgtacgatgaggcctgggagagaatcgacaagaaggtggaaggcctgagcaagcacattaagctggaagaggaaagaaggagcgaggacgcccaatctaaagccgctctgaccgattggctgagagccaaggccagctttgtgatcgagggcctgaaagaggccgacaaggacgagttctgcagatgcgagctgaagctgcagaagtggtacggcgatctgagaggcaagcccttcgccattgaggccgagaacagcatcctggacatcagcggcttcagcaagcagtacaactgcgccttcatttggcagaaagacggcgtcaagaaactgaacctgtacctgatcatcaattacttcaaaggcggcaagctgcggttcaagaagatcaaacccgaggccttcgaggctaacagattctacaccgtgatcaacaaaaagtccggcgagatcgtgcccatggaagtgaacttcaacttcgacgaccccaacctgattatcctgcctctggccttcggcaagagacagggcagagagttcatctggaacgatctgctgagcctggaaaccggctctctgaagctggccaatggcagagtgatcgagaaaaccctgtacaacaggagaaccagacaggacgagcctgctctgtttgtggccctgaccttcgagagaagagaggtgctggacagcagcaacatcaagcccatgaacctgatcggcgtggaccggggcgagaatatccctgctgtgatcgccctgacagaccctgaaggatgcccactgagcagattcaaggactccctgggcaaccctacacacatcctgagaatcggcgagagctacaaagagaagcagaggacaatccaggccaagaaagaggtggaacagagacgagccggcggatactctaggaagtacgccagcaaggccaagaatctggccgacgacatggtccgaaacaccgccagagatctgctgtactacgccgtgacacaggacgccatgctgatcttcgagaatctgagcagaggcttcggccggcagggcaagagaacctttatggccgagaggcagtacaccagaatggaagattggctcacagctaaactggcctacgagggactgcccagcaagacctacctgtccaaaacactggcccagtatacctccaagacctgcagcaattgcggcttcaccatcaccagcgccgactacgacagagtgctggaaaagctcaagaaaaccgccaccggctggatgaccaccatcaacggcaaagagctgaaggttgagggccagatcacctactacaacaggtacaagaggcagaacgtcgtgaaggatctgagcgtggaactggacagactgagcgaagagagcgtgaacaacgacatcagcagctggacaaagggcagatcaggcgaggctctgagcctgctgaagaagaggtttagccacagacctgtgcaagagaagttcgtgtgcctgaactgcggcttcgagacacacgccgatgaacaggctgccctgaacattgccagaagctggctgttcctgagaagccaagagtacaagaagtaccagaccaacaagaccaccggcaacaccgacaagagggcctttgtggaaacctggcagagcttctacagaaaaaagctgaaagaagtctggaagcccgccgtg

SEQ ID NO: 9322 - DNA, 2937 bp, synthetic construct
  source 1..2937: mol_type = other DNA
caagagatcaagagaatcaacaagatcagaaggagactggtcaaggacagcaacacaaagaaggccggcaagacaagaggccccatgaaaaccctgctcgtcagagtgatgacccctgacctgagagagcggctggaaaacctgagaaagaagcccgagaacatccctcagcctatcagcaacaccagcagggccaacctgaacaagctgctgaccgactacaccgagatgaagaaagccatcctgcacgtgtactgggaagagttccagaaagaccccgtgggcctgatgagcagagttgctcagcctgccagcaagaagatcgaccagaacaagctgaagcccgagatggacgagaagggcaatctgaccacagccggctttgcctgctctcagtgtggccagcctctgttcgtgtacaagctggaacaggtgtccgagaaaggcaaggcctacaccaactacttcggcagatgtaacgtggccgagcacgagaagctgattaagctggcccagctgaaacctgagaaggactctgatgaggccgtgacctacagcctgggcaagtttggacagagagccctggacttctacagcatccacgtgaccaaagaaagcacacaccccgtgaagcccctggctcagatcgccggcaatagatacgcctctagccctgtgggcaaagccctgtccgatgcctgcatgggaacaatcgccagcttcctgagcaagtaccaggacatcatcatcgagcaccagaaggtggtcaagggcaaccagaagagactggaaagcctgagggagctggccggcaaagagaacctggaataccccagcgtgaccctgcctcctcagcctcacacaaaagaaggcgtggacgcctacaacgaagtgatcgccagagtgagaatgtgggtcaacctgaacctgtggcagaagctgaaactgtccagggacgacgccaagcctctgctgagactgaagggcttccctagcttccctctggtggaaagacaggccaatgaagtggattggtgggacatggtctgcaacgtgaagaagctgatcaacgagaagaaagaggatggcaaggttttctggcagaacctggccggctacaagagacaagaagccctgaggccttacctgagcagcgaagaggaccggaagaagggcaagaagttcgccagataccagctgggcgacctgctgctgcacctggaaaagaagcacggcgaggactggggcaaagtgtacgatgaggcctgggagagaatcgacaagaaggtggaaggcctgagcaagcacattaagctggaagaggaaagaaggagcgaggacgcccaatctaaagccgctctgaccgattggctgagagccaaggccagctttgtgatcgagggcctgaaagaggccgacaaggacgagttctgcagatgcgagctgaagctgcagaagtggtacggcgatctgagaggcaagcccttcgccattgaggccgagaacagcatcctggacatcagcggcttcagcaagcagtacaactgcgccttcatttggcagaaagacggcgtcaagaaactgaacctgtacctgatcatcaattacttcaaaggcggcaagctgcggttcaagaagatcaaacccgaggccttcgaggctaacagattctacaccgtgatcaacaaaaagtccggcgagatcgtgcccatggaagtgaacttcaacttcgacgaccccaacctgattatcctgcctctggccttcggcaagagacagggcagagagttcatctggaacgatctgctgagcctggaaaccggctctctgaagctggccaatggcagagtgatcgagaaaaccctgtacaacaggagaaccagacaggacgagcctgctctgtttgtggccctgaccttcgagagaagagaggtgctggacagcagcaacatcaagcccatgaacctgatcggcgtggaccggggcgagaatatccctgctgtgatcgccctgacagaccctgaaggatgcccactgagcagattcaaggactccctgggcaaccctacacacatcctgagaatcggcgagagctacaaagagaagcagaggacaatccaggccaagaaagaggtggaacagagacgagccggcggatactctaggaagtacgccagcaaggccaagaatctggccgacgacatggtccgaaacaccgccagagatctgctgtactacgccgtgacacaggacgccatgctgatcttcgagaatctgagcagaggcttcggccggcagggcaagagaacctttatggccgagaggcagtacaccagaatggaagattggctcacagctaaactggcctacgagggactgcccagcaagacctacctgtccaaaacactggcccagtatacctccaagacctgcagcaattgcggcttcaccatcaccagcgccgactacgacagagtgctggaaaagctcaagaaaaccgccaccggctggatgaccaccatcaacggcaaagagctgaaggttgagggccagatcacctactacaacaggtacaagaggcagaacgtcgtgaaggatctgagcgtggaactggacagactgagcgaagagagcgtgaacaacgacatcagcagctggacaaagggcagatcaggcgaggctctgagcctgctgaagaagaggtttagccacagacctgtgcaagagaagttcgtgtgcctgaactgcggcttcgagacacacgccgatgaacaggctgccctgaacattgccagaagctggctgttcctgagaagccaagagtacaagaagtaccagaccaacaagaccaccggcaacaccgacaagagggcctttgtggaaacctggcagagcttctacagaaaaaagctgaaagaagtctggaagcccgccgtg

SEQ ID NO: 9323 - DNA, 2934 bp, synthetic construct
  source 1..2934: mol_type = other DNA
caagagatcaagagaatcaacaagatcagaaggagactggtcaaggacagcaacacaaagaaggccggcaagacaggccccatgaaaaccctgctcgtcagagtgatgacccctgacctgagagagcggctggaaaacctgagaaagaagcccgagaacatccctcagcctatcagcaacaccagcagggccaacctgaacaagctgctgaccgactacaccgagatgaagaaagccatcctgcacgtgtactgggaagagttccagaaagaccccgtgggcctgatgagcagagttgctcagcctgccagcaagaagatcgaccagaacaagctgaagcccgagatggacgagaagggcaatctgaccacagccggctttgcctgctctcagtgtggccagcctctgttcgtgtacaagctggaacaggtgtccgagaaaggcaaggcctacaccaactacttcggcagatgtaacgtggccgagcacgagaagctgattctgctggcccagctgaaacctgagaaggactctgatgaggccgtgacctacagcctgggcaagtttggacagagagccctggacttctacagcatccacgtgaccaaagaaagcacacaccccgtgaagcccctggctcagatcgccggcaatagatacgcctctggacctgtgggcaaagccctgtccgatgcctgcatgggaacaatcgccagcttcctgagcaagtaccaggacatcatcatcgagcaccagaaggtggtcaagggcaaccagaagagactggaaagcctgagggagctggccggcaaagagaacctggaataccccagcgtgaccctgcctcctcagcctcacacaaaagaaggcgtggacgcctacaacgaagtgatcgccagagtgagatggtgggtcaacctgaacctgtggcagaagctgaaactgtccagggacgacgccaagcctctgctgagactgaagggcttccctagcttccctctggtggaaagacaggccaatgaagtggattggtgggacatggtctgcaacgtgaagaagctgatcaacgagaagaaagaggatggcaaggttttctggcagaacctggccggctacaagagacaagaagccctgaggccttacctgagcagcgaagaggaccggaagaagggcaagaagttcgccagataccagctgggcgacctgctgctgcacctggaaaagaagcacggcgaggactggggcaaagtgtacgatgaggcctgggagagaatcgacaagaaggtggaaggcctgagcaagcacattaagctggaagaggaaagaaggagcgaggacgcccaatctaaagccgctctgaccgattggctgagagccaaggccagctttgtgatcgagggcctgaaagaggccgacaaggacgagttctgcagatgcgagctgaagctgcagaagtggtacggcgatctgagaggcaagcccttcgccattgaggccgagaacagcatcctggacatcagcggcttcagcaagcagtacaactgcgccttcatttggcagaaagacggcgtcaagaaactgaacctgtacctgatcatcaattacttcaaaggcggcaagctgcggttcaagaagatcaaacccgaggccttcgaggctaacagattctacaccgtgatcaacaaaaagtccggcgagatcgtgcccatggaagtgaacttcaacttcgacgaccccaacctgattatcctgcctctggccttcggcaagagacagggcagagagttcatctggaacgatctgctgagcctggaaaccggctctctgaagctggccaatggcagagtgatcgagaaaaccctgtacaacaggagaaccagacaggacgagcctgctctgtttgtggccctgaccttcgagagaagagaggtgctggacagcagcaacatcaagcccatgaacctgatcggcgtggaccggggcgagaatatccctgctgtgatcgccctgacagaccctgaaggatgcccactgagcagattcaaggactccctgggcaaccctacacacatcctgagaatcggcgagagctacaaagagaagcagaggacaatccaggccaagaaagaggtggaacagagacgagccggcggatactctaggaagtacgccagcaaggccaagaatctggccgacgacatggtccgaaacaccgccagagatctgctgtactacgccgtgacacaggacgccatgctgatcttcgagaatctgagcagaggcttcggccggcagggcaagagaacctttatggccgagaggcagtacaccagaatggaagattggctcacagctaaactggcctacgagggactgcccagcaagacctacctgtccaaaacactggcccagtatacctccaagacctgcagcaattgcggcttcaccatcaccagcgccgactacgacagagtgctggaaaagctcaagaaaaccgccaccggctggatgaccaccatcaacggcaaagagctgaaggttgagggccagatcacctactacaacaggtacaagaggcagaacgtcgtgaaggatctgagcgtggaactggacagactgagcgaagagagcgtgaacaacgacatcagcagctggacaaagggcagatcaggcgaggctctgagcctgctgaagaagaggtttagccacagacctgtgcaagagaagttcgtgtgcctgaactgcggcttcgagacacacgccgatgaacaggctgccctgaacattgccagaagctggctgttcctgagaagccaagagtacaagaagtaccagaccaacaagaccaccggcaacaccgacaagagggcctttgtggaaacctggcagagcttctacagaaaaaagctgaaagaagtctggaagcccgccgtg

SEQ ID NO: 9324 - DNA, 2934 bp, synthetic construct
  source 1..2934: mol_type = other DNA
caagagatcaagagaatcaacaagatcagaaggagactggtcaaggacagcaacacaaagaaggccggcaagacaggccccatgaaaaccctgctcgtcagagtgatgacccctgacctgagagagcggctggaaaacctgagaaagaagcccgagaacatccctcagcctatcagcaacaccagcagggccaacctgaacaagctgctgaccgactacaccgagatgaagaaagccatcctgcacgtgtactgggaagagttccagaaagaccccgtgggcctgatgagcagagttgctcagcctgccagcaagaagatcgaccagaacaagctgaagcccgagatggacgagaagggcaatctgaccacagccggctttgcctgctctcagtgtggccagcctctgttcgtgtacaagctggaacaggtgtccgagaaaggcaaggcctacaccaactacttcggcagatgtaacgtggccgagcacgagaagctgattctgctggcccagctgaaacctgagaaggactctgatgaggccgtgacctacagcctgggcaagtttggacagagagccctggacttctacagcatccacgtgaccaaagaaagcacacaccccgtgaagcccctggctcagatcgccggcaatagatacgcctctggacctgtgggcaaagccctgtccgatgcctgcatgggaacaatcgccagcttcctgagcaagtaccaggacatcatcatcgagcaccagaaggtggtcaagggcaaccagaagagactggaaagcctgagggagctggccggcaaagagaacctggaataccccagcgtgaccctgcctcctcagcctcacacaaaagaaggcgtggacgcctacaacgaagtgatcgccagagtgagaatgtgggtcaacctgaacctgtggcagaagctgaaactgtccagggacgacgccaagcctctgctgagactgaagaagttccctagcttccctctggtggaaagacaggccaatgaagtggattggtgggacatggtctgcaacgtgaagaagctgatcaacgagaagaaagaggatggcaaggttttctggcagaacctggccggctacaagagacaagaagccctgaggccttacctgagcagcgaagaggaccggaagaagggcaagaagttcgccagataccagctgggcgacctgctgctgcacctggaaaagaagcacggcgaggactggggcaaagtgtacgatgaggcctgggagagaatcgacaagaaggtggaaggcctgagcaagcacattaagctggaagaggaaagaaggagcgaggacgcccaatctaaagccgctctgaccgattggctgagagccaaggccagctttgtgatcgagggcctgaaagaggccgacaaggacgagttctgcagatgcgagctgaagctgcagaagtggtacggcgatctgagaggcaagcccttcgccattgaggccgagaacagcatcctggacatcagcggcttcagcaagcagtacaactgcgccttcatttggcagaaagacggcgtcaagaaactgaacctgtacctgatcatcaattacttcaaaggcggcaagctgcggttcaagaagatcaaacccgaggccttcgaggctaacagattctacaccgtgatcaacaaaaagtccggcgagatcgtgcccatggaagtgaacttcaacttcgacgaccccaacctgattatcctgcctctggccttcggcaagagacagggcagagagttcatctggaacgatctgctgagcctggaaaccggctctctgaagctggccaatggcagagtgatcgagaaaaccctgtacaacaggagaaccagacaggacgagcctgctctgtttgtggccctgaccttcgagagaagagaggtgctggacagcagcaacatcaagcccatgaacctgatcggcgtggaccggggcgagaatatccctgctgtgatcgccctgacagaccctgaaggatgcccactgagcagattcaaggactccctgggcaaccctacacacatcctgagaatcggcgagagctacaaagagaagcagaggacaatccaggccaagaaagaggtggaacagagacgagccggcggatactctaggaagtacgccagcaaggccaagaatctggccgacgacatggtccgaaacaccgccagagatctgctgtactacgccgtgacacaggacgccatgctgatcttcgagaatctgagcagaggcttcggccggcagggcaagagaacctttatggccgagaggcagtacaccagaatggaagattggctcacagctaaactggcctacgagggactgcccagcaagacctacctgtccaaaacactggcccagtatacctccaagacctgcagcaattgcggcttcaccatcaccagcgccgactacgacagagtgctggaaaagctcaagaaaaccgccaccggctggatgaccaccatcaacggcaaagagctgaaggttgagggccagatcacctactacaacaggtacaagaggcagaacgtcgtgaaggatctgagcgtggaactggacagactgagcgaagagagcgtgaacaacgacatcagcagctggacaaagggcagatcaggcgaggctctgagcctgctgaagaagaggtttagccacagacctgtgcaagagaagttcgtgtgcctgaactgcggcttcgagacacacgccgatgaacaggctgccctgaacattgccagaagctggctgttcctgagaagccaagagtacaagaagtaccagaccaacaagaccaccggcaacaccgacaagagggcctttgtggaaacctggcagagcttctacagaaaaaagctgaaagaagtctggaagcccgccgtg

SEQ ID NO: 9325 - DNA, 2937 bp, synthetic construct
  source 1..2937: mol_type = other DNA
caagagatcaagagaatcaacaagatcagaaggagactggtcaaggacagcaacacaaagaaggccggcaagacaagaggccccatgaaaaccctgctcgtcagagtgatgacccctgacctgagagagcggctggaaaacctgagaaagaagcccgagaacatccctcagcctatcagcaacaccagcagggccaacctgaacaagctgctgaccgactacaccgagatgaagaaagccatcctgcacgtgtactgggaagagttccagaaagaccccgtgggcctgatgagcagagttgctcagcctgccagcaagaagatcgaccagaacaagctgaagcccgagatggacgagaagggcaatctgaccacagccggctttgcctgctctcagtgtggccagcctctgttcgtgtacaagctggaacaggtgtccgagaaaggcaaggcctacaccaactacttcggcagatgtaacgtggccgagcacgagaagctgattctgctggcccagctgaaacctgagaaggactctgatgaggccgtgacctacagcctgggcaagtttggacagagagccctggacttctacagcatccacgtgaccaaagaaagcacacaccccgtgaagcccctggctcagatcgccggcaatagatacgcctctagccctgtgggcaaagccctgtccgatgcctgcatgggaacaatcgccagcttcctgagcaagtaccaggacatcatcatcgagcaccagaaggtggtcaagggcaaccagaagagactggaaagcctgagggagctggccggcaaagagaacctggaataccccagcgtgaccctgcctcctcagcctcacacaaaagaaggcgtggacgcctacaacgaagtgatcgccagagtgagaatgtgggtcaacctgaacctgtggcagaagctgaaactgtccagggacgacgccaagcctctgctgagactgaagggcttccctagcttccctctggtggaaagacaggccaatgaagtggattggtgggacatggtctgcaacgtgaagaagctgatcaacgagaagaaagaggatggcaaggttttctggcagaacctggccggctacaagagacaagaagccctgaggccttacctgagcagcgaagaggaccggaagaagggcaagaagttcgccagataccagctgggcgacctgctgctgcacctggaaaagaagcacggcgaggactggggcaaagtgtacgatgaggcctgggagagaatcgacaagaaggtggaaggcctgagcaagcacattaagctggaagaggaaagaaggagcgaggacgcccaatctaaagccgctctgaccgattggctgagagccaaggccagctttgtgatcgagggcctgaaagaggccgacaaggacgagttctgcagatgcgagctgaagctgcagaagtggtacggcgatctgagaggcaagcccttcgccattgaggccgagaacagcatcctggacatcagcggcttcagcaagcagtacaactgcgccttcatttggcagaaagacggcgtcaagaaactgaacctgtacctgatcatcaattacttcaaaggcggcaagctgcggttcaagaagatcaaacccgaggccttcgaggctaacagattctacaccgtgatcaacaaaaagtccggcgagatcgtgcccatggaagtgaacttcaacttcgacgaccccaacctgattatcctgcctctggccttcggcaagagacagggcagagagttcatctggaacgatctgctgagcctggaaaccggctctctgaagctggccaatggcagagtgatcgagaaaaccctgtacaacaggagaaccagacaggacgagcctgctctgtttgtggccctgaccttcgagagaagagaggtgctggacagcagcaacatcaagcccatgaacctgatcggcgtggaccggggcgagaatatccctgctgtgatcgccctgacagaccctgaaggatgcccactgagcagattcaaggactccctgggcaaccctacacacatcctgagaatcggcgagagctacaaagagaagcagaggacaatccaggccaagaaagaggtggaacagagacgagccggcggatactctaggaagtacgccagcaaggccaagaatctggccgacgacatggtccgaaacaccgccagagatctgctgtactacgccgtgacacaggacgccatgctgatcttcgagaatctgagcagaggcttcggccggcagggcaagagaacctttatggccgagaggcagtacaccagaatggaagattggctcacagctaaactggcctacgagggactgcccagcaagacctacctgtccaaaacactggcccagtatacctccaagacctgcagcaattgcggcttcaccatcaccagcgccgactacgacagagtgctggaaaagctcaagaaaaccgccaccggctggatgaccaccatcaacggcaaagagctgaaggttgagggccagatcacctactacaacaggtacaagaggcagaacgtcgtgaaggatctgagcgtggaactggacagactgagcgaagagagcgtgaacaacgacatcagcagctggacaaagggcagatcaggcgaggctctgagcctgctgaagaagaggtttagccacagacctgtgcaagagaagttcgtgtgcctgaactgcggcttcgagacacacgccgatgaacaggctgccctgaacattgccagaagctggctgttcctgagaagccaagagtacaagaagtaccagaccaacaagaccaccggcaacaccgacaagagggcctttgtggaaacctggcagagcttctacagaaaaaagctgaaagaagtctggaagcccgccgtg

SEQ ID NO: 9326 - DNA, 2934 bp, synthetic construct
  source 1..2934: mol_type = other DNA
caagagatcaagagaatcaacaagatcagaaggagactggtcaaggacagcaacacaaagaaggccggcaagacaggccccatgaaaaccctgctcgtcagagtgatgacccctgacctgagagagcggctggaaaacctgagaaagaagcccgagaacatccctcagcctatcagcaacaccagcagggccaacctgaacaagctgctgaccgactacaccgagatgaagaaagccatcctgcacgtgtactgggaagagttccagaaagaccccgtgggcctgatgagcagagttgctcagcctgccagcaagaagatcgaccagaacaagctgaagcccgagatggacgagaagggcaatctgaccacagccggctttgcctgctctcagtgtggccagcctctgttcgtgtacaagctggaacaggtgtccgagaaaggcaaggcctacaccaactacttcggcagatgtaacgtggccgagcacgagaagctgattaagctggcccagctgaaacctgagaaggactctgatgaggccgtgacctacagcctgggcaagtttggacagagagccctggacttctacagcatccacgtgaccaaagaaagcacacaccccgtgaagcccctggctcagatcgccggcaatagatacgcctctagccctgtgggcaaagccctgtccgatgcctgcatgggaacaatcgccagcttcctgagcaagtaccaggacatcatcatcgagcaccagaaggtggtcaagggcaaccagaagagactggaaagcctgagggagctggccggcaaagagaacctggaataccccagcgtgaccctgcctcctcagcctcacacaaaagaaggcgtggacgcctacaacgaagtgatcgccagagtgagaatgtgggtcaacctgaacctgtggcagaagctgaaactgtccagggacgacgccaagcctctgctgagactgaagggcttccctagcttccctctggtggaaagacaggccaatgaagtggattggtgggacatggtctgcaacgtgaagaagctgatcaacgagaagaaagaggatggcaaggttttctggcagaacctggccggctacaagagacaagaagccctgaggccttacctgagcagcgaagaggaccggaagaagggcaagaagttcgccagataccagctgggcgacctgctgctgcacctggaaaagaagcacggcgaggactggggcaaagtgtacgatgaggcctgggagagaatcgacaagaaggtggaaggcctgagcaagcacattaagctggaagaggaaagaaggagcgaggacgcccaatctaaagccgctctgaccgattggctgagagccaaggccagctttgtgatcgagggcctgaaagaggccgacaaggacgagttctgcagatgcgagctgaagctgcagaagtggtacggcgatctgagaggcaagcccttcgccattgaggccgagaacagcatcctggacatcagcggcttcagcaagcagtacaactgcgccttcatttggcagaaagacggcgtcaagaaactgaacctgtacctgatcatcaattacttcaaaggcggcaagctgcggttcaagaagatcaaacccgaggccttcgaggctaacagattctacaccgtgatcaacaaaaagtccggcgagatcgtgcccatggaagtgaacttcaacttcgacgaccccaacctgattatcctgcctctggccttcggcaagagacagggcagagagttcatctggaacgatctgctgagcctggaaaccggctctctgaagctggccaatggcagagtgatcgagaaaaccctgtacaacaggagaaccagacaggacgagcctgctctgtttgtggccctgaccttcgagagaagagaggtgctggacagcagcaacatcaagcccatgaacctgatcggcgtggaccggggcgagaatatccctgctgtgatcgccctgacagaccctgaaggatgcccactgagcagattcaaggactccctgggcaaccctacacacatcctgagaatcggcgagagctacaaagagaagcagaggacaatccaggccaagaaagaggtggaacagagacgagccggcggatactctaggaagtacgccagcaaggccaagaatctggccgacgacatggtccgaaacaccgccagagatctgctgtactacgccgtgacacaggacgccatgctgatcttcgagaatctgagcagaggcttcggccggcagggcaagagaacctttatggccgagaggcagtacaccagaatggaagattggctcacagctaaactggcctacgagggactgcccagcaagacctacctgtccaaaacactggcccagtatacctccaagacctgcagcaattgcggcttcaccatcaccagcgccgactacgacagagtgctggaaaagctcaagaaaaccgccaccggctggatgaccaccatcaacggcaaagagctgaaggttgagggccagatcacctactacaacaggtacaagaggcagaacgtcgtgaaggatctgagcgtggaactggacagactgagcgaagagagcgtgaacaacgacatcagcagctggacaaagggcagatcaggcgaggctctgagcctgctgaagaagaggtttagccacagacctgtgcaagagaagttcgtgtgcctgaactgcggcttcgagacacacgccgatgaacaggctgccctgaacattgccagaagctggctgttcctgagaagccaagagtacaagaagtaccagaccaacaagaccaccggcaacaccgacaagagggcctttgtggaaacctggcagagcttctacagaaaaaagctgaaagaagtctggaagcccgccgtg

SEQ ID NO: 9327 - DNA, 2931 bp, synthetic construct
  source 1..2931: mol_type = other DNA
caagagatcaagaggatcaacaagattagaagaaggctggtcaaggacagcaacaccaagaaggcaggcaagacaggccccatgaagaccctgcttgtcagagtgatgacccctgacctgagagagagactggaaaacctgagaaagaagcctgagaacatccctcagcctatctccaacaccagcagagccaacctgaacaagctgctgacagactacacagagatgaagaaagccatcctgcatgtgtactgggaagagttccagaaagaccctgtgggcctgatgagcagagtggcccagcctgccagcaagaagattgaccagaacaaactgaagccagagatggatgagaagggcaacctgaccacagctggctttgcctgctctcagtgtggccagcctctgtttgtgtacaagctggaacaagtgtctgagaaaggcaaggcctacaccaactactttggcagatgcaatgtggctgagcatgagaagctgatcctgctggcccagctgaagcctgaaaaggactctgatgaggctgtgacctacagcctgggcaagtttggacagagagccctggacttctacagcatccatgtgaccaaagaaagcacacaccctgtgaagcccctggctcagattgctggcaacagatatgcctctggacctgtgggcaaagccctgtctgatgcctgcatgggaaccattgccagctttctgagcaagtaccaggacatcatcattgagcaccagaaagtggtcaaggggaaccagaagaggctggaatctctgagagagctggctggcaaagagaacctggaatacccctctgtgaccctgcctcctcagcctcacaccaaagagggtgttgatgcctacaatgaagtgattgccagagtcaggatgtgggtcaacctgaatctgtggcagaagctgaagctgagcagggatgatgccaagcctctgctgagactgaagggcttccctagcttcccactggtggaaaggcaggctaatgaagtggattggtgggacatggtctgcaatgtgaagaaactgatcaatgagaagaaagaggatggcaaggttttctggcagaacctggctggctacaagaggcaagaagccctgaggccttacctgtcctctgaggaagataggaagaaggggaagaagtttgccagataccagctgggagatctgctgctgcacctggaaaagaaacatggggaagattggggcaaagtgtatgatgaggcctgggagagaattgacaagaaggtggaaggcctgagcaagcacattaagctggaagaggaaagaagatctgaggatgcccagagcaaggctgccctgactgattggctgagagccaaggccagctttgtgattgagggcctgaaagaggctgacaaggatgagttctgtagatgtgaactgaagctgcaaaagtggtatggggacctgaggggcaagccctttgccattgaggcagagaacagcatcctggacatcagtggcttcagcaagcagtacaactgtgccttcatttggcagaaggatggggttaagaagctcaacctgtacctgatcatcaactacttcaaaggtggcaagctgaggttcaagaagatcaagccagaggcctttgaggccaacaggttctacacagtgatcaacaaaaagtctggggagattgtgcccatggaagtgaacttcaactttgatgatcccaacctcatcatcctgccactggcctttggcaagagacagggcagagaattcatctggaatgacctgctgagcctggaaacaggcagcctgaaactggccaatggcagagtgattgagaaaaccctgtacaacagaaggaccagacaggatgagcctgcactgtttgtggccctgacctttgagagaagggaagtgctggatagcagcaacatcaagcccatgaacctgattggagtggacagaggggagaatatccctgctgtcattgccctgacagaccctgagggctgtcccctgagcagattcaaggactccctgggcaaccccacacacattctgagaattggggagagctacaaagagaagcagagaaccatccaggccaagaaagaagtggaacagaggagagctggaggctactctaggaagtatgccagcaaagccaagaatctggctgatgacatggtcagaaacacagccagggacctgctgtactatgctgtgacccaggatgccatgctgatctttgagaatctgagcagaggatttgggagacaaggcaagaggaccttcatggctgaaagacagtacaccaggatggaagattggctgactgccaaactggcctatgagggactgagcaagacctacctgtccaagacactggcccagtatacctccaagacctgcagcaattgtggcttcaccatcacctctgcagactatgacagagtgctggaaaagctcaagaaaacagccacaggctggatgaccaccatcaatgggaaagagctgaaggttgagggccagatcacctactacaacagatacaaaaggcagaatgtggttaaggacctgtctgtggaactggacagactgtctgaggaatctgtgaacaatgacatcagcagctggaccaagggcagatctggggaagctctgagcctgctgaagaagagattcagccacagacctgtgcaagagaagtttgtgtgtctgaactgtggctttgagacacatgctgatgaacaggctgctctgaacattgccagaagctggctgttcctgagaagccaagagtacaagaagtaccagaccaacaagaccacaggcaacactgacaagagggcctttgtggaaacctggcagagcttctacagaaagaaactcaaagaagtctggaagcctgctgtg

SEQ ID NO: 9328 - DNA, 2934 bp, synthetic construct
  source 1..2934: mol_type = other DNA
caagagatcaagaggatcaacaagattagaagaaggctggtcaaggacagcaacaccaagaaggcaggcaagacaggccccatgaagaccctgcttgtcagagtgatgacccctgacctgagagagagactggaaaacctgagaaagaagcctgagaacatccctcagcctatctccaacaccagcagagccaacctgaacaagctgctgacagactacacagagatgaagaaagccatcctgcatgtgtactgggaagagttccagaaagaccctgtgggcctgatgagcagagtggcccagcctgccagcaagaagattgaccagaacaaactgaagccagagatggatgagaagggcaacctgaccacagctggctttgcctgctctcagtgtggccagcctctgtttgtgtacaagctggaacaagtgtctgagaaaggcaaggcctacaccaactactttggcagatgcaatgtggctgagcatgagaagctgatcctgctggcccagctgaagcctgaaaaggactctgatgaggctgtgacctacagcctgggcaagtttggacagagagccctggacttctacagcatccatgtgaccaaagaaagcacacaccctgtgaagcccctggctcagattgctggcaacagatatgcctctggacctgtgggcaaagccctgtctgatgcctgcatgggaaccattgccagctttctgagcaagtaccaggacatcatcattgagcaccagaaagtggtcaaggggaaccagaagaggctggaatctctgagagagctggctggcaaagagaacctggaatacccctctgtgaccctgcctcctcagcctcacaccaaagagggtgttgatgcctacaatgaagtgattgccagagtcaggatgtgggtcaacctgaatctgtggcagaagctgaagctgagcagggatgatgccaagcctctgctgagactgaagggcttccctagcttcccactggtggaaaggcaggctaatgaagtggattggtgggacatggtctgcaatgtgaagaaactgatcaatgagaagaaagaggatggcaaggttttctggcagaacctggctggctacaagaggcaagaagccctgaggccttacctgtcctctgaggaagataggaagaaggggaagaagtttgccagataccagctgggagatctgctgctgcacctggaaaagaaacatggggaagattggggcaaagtgtatgatgaggcctgggagagaattgacaagaaggtggaaggcctgagcaagcacattaagctggaagaggaaagaagatctgaggatgcccagagcaaggctgccctgactgattggctgagagccaaggccagctttgtgattgagggcctgaaagaggctgacaaggatgagttctgtagatgtgaactgaagctgcaaaagtggtatggggacctgaggggcaagccctttgccattgaggcagagaacagcatcctggacatcagtggcttcagcaagcagtacaactgtgccttcatttggcagaaggatggggttaagaagctcaacctgtacctgatcatcaactacttcaaaggtggcaagctgaggttcaagaagatcaagccagaggcctttgaggccaacaggttctacacagtgatcaacaaaaagtctggggagattgtgcccatggaagtgaacttcaactttgatgatcccaacctcatcatcctgccactggcctttggcaagagacagggcagagaattcatctggaatgacctgctgagcctggaaacaggcagcctgaaactggccaatggcagagtgattgagaaaaccctgtacaacagaaggaccagacaggatgagcctgcactgtttgtggccctgacctttgagagaagggaagtgctggatagcagcaacatcaagcccatgaacctgattggagtggacagaggggagaatatccctgctgtcattgccctgacagaccctgagggctgtcccctgagcagattcaaggactccctgggcaaccccacacacattctgagaattggggagagctacaaagagaagcagagaaccatccaggccaagaaagaagtggaacagaggagagctggaggctactctaggaagtatgccagcaaagccaagaatctggctgatgacatggtcagaaacacagccagggacctgctgtactatgctgtgacccaggatgccatgctgatctttgagaatctgagcagaggatttgggagacaaggcaagaggaccttcatggctgaaagacagtacaccaggatggaagattggctgactgccaaactggcctatgagggactgcccagcaagacctacctgtccaagacactggcccagtatacctccaagacctgcagcaattgtggcttcaccatcacctctgcagactatgacagagtgctggaaaagctcaagaaaacagccacaggctggatgaccaccatcaatgggaaagagctgaaggttgagggccagatcacctactacaacagatacaaaaggcagaatgtggttaaggacctgtctgtggaactggacagactgtctgaggaatctgtgaacaatgacatcagcagctggaccaagggcagatctggggaagctctgagcctgctgaagaagagattcagccacagacctgtgcaagagaagtttgtgtgtctgaactgtggctttgagacacatgctgatgaacaggctgctctgaacattgccagaagctggctgttcctgagaagccaagagtacaagaagtaccagaccaacaagaccacaggcaacactgacaagagggcctttgtggaaacctggcagagcttctacagaaagaaactcaaagaagtctggaagcctgctgtg

SEQ ID NO: 9329 - DNA, 2934 bp, synthetic construct
  source 1..2934: mol_type = other DNA
caagagatcaagaggatcaacaagattagaagaaggctggtcaaggacagcaacaccaagaaggcaggcaagacaggccccatgaagaccctgcttgtcagagtgatgacccctgacctgagagagagactggaaaacctgagaaagaagcctgagaacatccctcagcctatctccaacaccagcagagccaacctgaacaagctgctgacagactacacagagatgaagaaagccatcctgcatgtgtactgggaagagttccagaaagaccctgtgggcctgatgagcagagtggcccagcctgccagcaagaagattgaccagaacaaactgaagccagagatggatgagaagggcaacctgaccacagctggctttgcctgctctcagtgtggccagcctctgtttgtgtacaagctggaacaagtgtctgagaaaggcaaggcctacaccaactactttggcagatgcaatgtggctgagcatgagaagctgatcctgctggcccagctgaagcctgaaaaggactctgatgaggctgtgacctacagcctgggcaagtttggacagagagccctggacttctacagcatccatgtgaccaaagaaagcacacaccctgtgaagcccctggctcagattgctggcaacagatatgcctctggacctgtgggcaaagccctgtctgatgcctgcatgggaaccattgccagctttctgagcaagtaccaggacatcatcattgagcaccagaaagtggtcaaggggaaccagaagaggctggaatctctgagagagctggctggcaaagagaacctggaatacccctctgtgaccctgcctcctcagcctcacaccaaagagggtgttgatgcctacaatgaagtgattgccagagtcaggtggtgggtcaacctgaatctgtggcagaagctgaagctgagcagggatgatgccaagcctctgctgagactgaagggcttccctagcttcccactggtggaaaggcaggctaatgaagtggattggtgggacatggtctgcaatgtgaagaaactgatcaatgagaagaaagaggatggcaaggttttctggcagaacctggctggctacaagaggcaagaagccctgaggccttacctgtcctctgaggaagataggaagaaggggaagaagtttgccagataccagctgggagatctgctgctgcacctggaaaagaaacatggggaagattggggcaaagtgtatgatgaggcctgggagagaattgacaagaaggtggaaggcctgagcaagcacattaagctggaagaggaaagaagatctgaggatgcccagagcaaggctgccctgactgattggctgagagccaaggccagctttgtgattgagggcctgaaagaggctgacaaggatgagttctgtagatgtgaactgaagctgcaaaagtggtatggggacctgaggggcaagccctttgccattgaggcagagaacagcatcctggacatcagtggcttcagcaagcagtacaactgtgccttcatttggcagaaggatggggttaagaagctcaacctgtacctgatcatcaactacttcaaaggtggcaagctgaggttcaagaagatcaagccagaggcctttgaggccaacaggttctacacagtgatcaacaaaaagtctggggagattgtgcccatggaagtgaacttcaactttgatgatcccaacctcatcatcctgccactggcctttggcaagagacagggcagagaattcatctggaatgacctgctgagcctggaaacaggcagcctgaaactggccaatggcagagtgattgagaaaaccctgtacaacagaaggaccagacaggatgagcctgcactgtttgtggccctgacctttgagagaagggaagtgctggatagcagcaacatcaagcccatgaacctgattggagtggacagaggggagaatatccctgctgtcattgccctgacagaccctgagggctgtcccctgagcagattcaaggactccctgggcaaccccacacacattctgagaattggggagagctacaaagagaagcagagaaccatccaggccaagaaagaagtggaacagaggagagctggaggctactctaggaagtatgccagcaaagccaagaatctggctgatgacatggtcagaaacacagccagggacctgctgtactatgctgtgacccaggatgccatgctgatctttgagaatctgagcagaggatttgggagacaaggcaagaggaccttcatggctgaaagacagtacaccaggatggaagattggctgactgccaaactggcctatgagggactgcccagcaagacctacctgtccaagacactggcccagtatacctccaagacctgcagcaattgtggcttcaccatcacctctgcagactatgacagagtgctggaaaagctcaagaaaacagccacaggctggatgaccaccatcaatgggaaagagctgaaggttgagggccagatcacctactacaacagatacaaaaggcagaatgtggttaaggacctgtctgtggaactggacagactgtctgaggaatctgtgaacaatgacatcagcagctggaccaagggcagatctggggaagctctgagcctgctgaagaagagattcagccacagacctgtgcaagagaagtttgtgtgtctgaactgtggctttgagacacatgctgatgaacaggctgctctgaacattgccagaagctggctgttcctgagaagccaagagtacaagaagtaccagaccaacaagaccacaggcaacactgacaagagggcctttgtggaaacctggcagagcttctacagaaagaaactcaaagaagtctggaagcctgctgtg

SEQ ID NO: 9330 - DNA, 2934 bp, synthetic construct
  source 1..2934: mol_type = other DNA
caagagatcaagaggatcaacaagattagaagaaggctggtcaaggacagcaacaccaagaaggcaggcaagacaggccccatgaagaccctgcttgtcagagtgatgacccctgacctgagagagagactggaaaacctgagaaagaagcctgagaacatccctcagcctatctccaacaccagcagagccaacctgaacaagctgctgacagactacacagagatgaagaaagccatcctgcatgtgtactgggaagagttccagaaagaccctgtgggcctgatgagcagagtggcccagcctgccagcaagaagattgaccagaacaaactgaagccagagatggatgagaagggcaacctgaccacagctggctttgcctgctctcagtgtggccagcctctgtttgtgtacaagctggaacaagtgtctgagaaaggcaaggcctacaccaactactttggcagatgcaatgtggctgagcatgagaagctgatcctgctggcccagctgaagcctgaaaaggactctgatgaggctgtgacctacagcctgggcaagtttggacagagagccctggacttctacagcatccatgtgaccaaagaaagcacacaccctgtgaagcccctggctcagattgctggcaacagatatgcctctggacctgtgggcaaagccctgtctgatgcctgcatgggaaccattgccagctttctgagcaagtaccaggacatcatcattgagcaccagaaagtggtcaaggggaaccagaagaggctggaatctctgagagagctggctggcaaagagaacctggaatacccctctgtgaccctgcctcctcagcctcacaccaaagagggtgttgatgcctacaatgaagtgattgccagagtcaggatgtgggtcaacctgaatctgtggcagaagctgaagctgagcagggatgatgccaagcctctgctgagactgaagaagttccctagcttcccactggtggaaaggcaggctaatgaagtggattggtgggacatggtctgcaatgtgaagaaactgatcaatgagaagaaagaggatggcaaggttttctggcagaacctggctggctacaagaggcaagaagccctgaggccttacctgtcctctgaggaagataggaagaaggggaagaagtttgccagataccagctgggagatctgctgctgcacctggaaaagaaacatggggaagattggggcaaagtgtatgatgaggcctgggagagaattgacaagaaggtggaaggcctgagcaagcacattaagctggaagaggaaagaagatctgaggatgcccagagcaaggctgccctgactgattggctgagagccaaggccagctttgtgattgagggcctgaaagaggctgacaaggatgagttctgtagatgtgaactgaagctgcaaaagtggtatggggacctgaggggcaagccctttgccattgaggcagagaacagcatcctggacatcagtggcttcagcaagcagtacaactgtgccttcatttggcagaaggatggggttaagaagctcaacctgtacctgatcatcaactacttcaaaggtggcaagctgaggttcaagaagatcaagccagaggcctttgaggccaacaggttctacacagtgatcaacaaaaagtctggggagattgtgcccatggaagtgaacttcaactttgatgatcccaacctcatcatcctgccactggcctttggcaagagacagggcagagaattcatctggaatgacctgctgagcctggaaacaggcagcctgaaactggccaatggcagagtgattgagaaaaccctgtacaacagaaggaccagacaggatgagcctgcactgtttgtggccctgacctttgagagaagggaagtgctggatagcagcaacatcaagcccatgaacctgattggagtggacagaggggagaatatccctgctgtcattgccctgacagaccctgagggctgtcccctgagcagattcaaggactccctgggcaaccccacacacattctgagaattggggagagctacaaagagaagcagagaaccatccaggccaagaaagaagtggaacagaggagagctggaggctactctaggaagtatgccagcaaagccaagaatctggctgatgacatggtcagaaacacagccagggacctgctgtactatgctgtgacccaggatgccatgctgatctttgagaatctgagcagaggatttgggagacaaggcaagaggaccttcatggctgaaagacagtacaccaggatggaagattggctgactgccaaactggcctatgagggactgcccagcaagacctacctgtccaagacactggcccagtatacctccaagacctgcagcaattgtggcttcaccatcacctctgcagactatgacagagtgctggaaaagctcaagaaaacagccacaggctggatgaccaccatcaatgggaaagagctgaaggttgagggccagatcacctactacaacagatacaaaaggcagaatgtggttaaggacctgtctgtggaactggacagactgtctgaggaatctgtgaacaatgacatcagcagctggaccaagggcagatctggggaagctctgagcctgctgaagaagagattcagccacagacctgtgcaagagaagtttgtgtgtctgaactgtggctttgagacacatgctgatgaacaggctgctctgaacattgccagaagctggctgttcctgagaagccaagagtacaagaagtaccagaccaacaagaccacaggcaacactgacaagagggcctttgtggaaacctggcagagcttctacagaaagaaactcaaagaagtctggaagcctgctgtg

SEQ ID NO: 9331 - DNA, 2937 bp, synthetic construct
  source 1..2937: mol_type = other DNA
caagagatcaagaggatcaacaagattagaagaaggctggtcaaggacagcaacaccaagaaggcaggcaagacaagaggccccatgaagaccctgcttgtcagagtgatgacccctgacctgagagagagactggaaaacctgagaaagaagcctgagaacatccctcagcctatctccaacaccagcagagccaacctgaacaagctgctgacagactacacagagatgaagaaagccatcctgcatgtgtactgggaagagttccagaaagaccctgtgggcctgatgagcagagtggcccagcctgccagcaagaagattgaccagaacaaactgaagccagagatggatgagaagggcaacctgaccacagctggctttgcctgctctcagtgtggccagcctctgtttgtgtacaagctggaacaagtgtctgagaaaggcaaggcctacaccaactactttggcagatgcaatgtggctgagcatgagaagctgatcctgctggcccagctgaagcctgaaaaggactctgatgaggctgtgacctacagcctgggcaagtttggacagagagccctggacttctacagcatccatgtgaccaaagaaagcacacaccctgtgaagcccctggctcagattgctggcaacagatatgcctctagccctgtgggcaaagccctgtctgatgcctgcatgggaaccattgccagctttctgagcaagtaccaggacatcatcattgagcaccagaaagtggtcaaggggaaccagaagaggctggaatctctgagagagctggctggcaaagagaacctggaatacccctctgtgaccctgcctcctcagcctcacaccaaagagggtgttgatgcctacaatgaagtgattgccagagtcaggatgtgggtcaacctgaatctgtggcagaagctgaagctgagcagggatgatgccaagcctctgctgagactgaagggcttccctagcttcccactggtggaaaggcaggctaatgaagtggattggtgggacatggtctgcaatgtgaagaaactgatcaatgagaagaaagaggatggcaaggttttctggcagaacctggctggctacaagaggcaagaagccctgaggccttacctgtcctctgaggaagataggaagaaggggaagaagtttgccagataccagctgggagatctgctgctgcacctggaaaagaaacatggggaagattggggcaaagtgtatgatgaggcctgggagagaattgacaagaaggtggaaggcctgagcaagcacattaagctggaagaggaaagaagatctgaggatgcccagagcaaggctgccctgactgattggctgagagccaaggccagctttgtgattgagggcctgaaagaggctgacaaggatgagttctgtagatgtgaactgaagctgcaaaagtggtatggggacctgaggggcaagccctttgccattgaggcagagaacagcatcctggacatcagtggcttcagcaagcagtacaactgtgccttcatttggcagaaggatggggttaagaagctcaacctgtacctgatcatcaactacttcaaaggtggcaagctgaggttcaagaagatcaagccagaggcctttgaggccaacaggttctacacagtgatcaacaaaaagtctggggagattgtgcccatggaagtgaacttcaactttgatgatcccaacctcatcatcctgccactggcctttggcaagagacagggcagagaattcatctggaatgacctgctgagcctggaaacaggcagcctgaaactggccaatggcagagtgattgagaaaaccctgtacaacagaaggaccagacaggatgagcctgcactgtttgtggccctgacctttgagagaagggaagtgctggatagcagcaacatcaagcccatgaacctgattggagtggacagaggggagaatatccctgctgtcattgccctgacagaccctgagggctgtcccctgagcagattcaaggactccctgggcaaccccacacacattctgagaattggggagagctacaaagagaagcagagaaccatccaggccaagaaagaagtggaacagaggagagctggaggctactctaggaagtatgccagcaaagccaagaatctggctgatgacatggtcagaaacacagccagggacctgctgtactatgctgtgacccaggatgccatgctgatctttgagaatctgagcagaggatttgggagacaaggcaagaggaccttcatggctgaaagacagtacaccaggatggaagattggctgactgccaaactggcctatgagggactgcccagcaagacctacctgtccaagacactggcccagtatacctccaagacctgcagcaattgtggcttcaccatcacctctgcagactatgacagagtgctggaaaagctcaagaaaacagccacaggctggatgaccaccatcaatgggaaagagctgaaggttgagggccagatcacctactacaacagatacaaaaggcagaatgtggttaaggacctgtctgtggaactggacagactgtctgaggaatctgtgaacaatgacatcagcagctggaccaagggcagatctggggaagctctgagcctgctgaagaagagattcagccacagacctgtgcaagagaagtttgtgtgtctgaactgtggctttgagacacatgctgatgaacaggctgctctgaacattgccagaagctggctgttcctgagaagccaagagtacaagaagtaccagaccaacaagaccacaggcaacactgacaagagggcctttgtggaaacctggcagagcttctacagaaagaaactcaaagaagtctggaagcctgctgtg

SEQ ID NO: 9332 - DNA, 2937 bp, synthetic construct
  source 1..2937: mol_type = other DNA
caagagatcaagaggatcaacaagattagaagaaggctggtcaaggacagcaacaccaagaaggcaggcaagacaagaggccccatgaagaccctgcttgtcagagtgatgacccctgacctgagagagagactggaaaacctgagaaagaagcctgagaacatccctcagcctatctccaacaccagcagagccaacctgaacaagctgctgacagactacacagagatgaagaaagccatcctgcatgtgtactgggaagagttccagaaagaccctgtgggcctgatgagcagagtggcccagcctgccagcaagaagattgaccagaacaaactgaagccagagatggatgagaagggcaacctgaccacagctggctttgcctgctctcagtgtggccagcctctgtttgtgtacaagctggaacaagtgtctgagaaaggcaaggcctacaccaactactttggcagatgcaatgtggctgagcatgagaagctgatcaagctggcccagctgaagcctgaaaaggactctgatgaggctgtgacctacagcctgggcaagtttggacagagagccctggacttctacagcatccatgtgaccaaagaaagcacacaccctgtgaagcccctggctcagattgctggcaacagatatgcctctagccctgtgggcaaagccctgtctgatgcctgcatgggaaccattgccagctttctgagcaagtaccaggacatcatcattgagcaccagaaagtggtcaaggggaaccagaagaggctggaatctctgagagagctggctggcaaagagaacctggaatacccctctgtgaccctgcctcctcagcctcacaccaaagagggtgttgatgcctacaatgaagtgattgccagagtcaggatgtgggtcaacctgaatctgtggcagaagctgaagctgagcagggatgatgccaagcctctgctgagactgaagggcttccctagcttcccactggtggaaaggcaggctaatgaagtggattggtgggacatggtctgcaatgtgaagaaactgatcaatgagaagaaagaggatggcaaggttttctggcagaacctggctggctacaagaggcaagaagccctgaggccttacctgtcctctgaggaagataggaagaaggggaagaagtttgccagataccagctgggagatctgctgctgcacctggaaaagaaacatggggaagattggggcaaagtgtatgatgaggcctgggagagaattgacaagaaggtggaaggcctgagcaagcacattaagctggaagaggaaagaagatctgaggatgcccagagcaaggctgccctgactgattggctgagagccaaggccagctttgtgattgagggcctgaaagaggctgacaaggatgagttctgtagatgtgaactgaagctgcaaaagtggtatggggacctgaggggcaagccctttgccattgaggcagagaacagcatcctggacatcagtggcttcagcaagcagtacaactgtgccttcatttggcagaaggatggggttaagaagctcaacctgtacctgatcatcaactacttcaaaggtggcaagctgaggttcaagaagatcaagccagaggcctttgaggccaacaggttctacacagtgatcaacaaaaagtctggggagattgtgcccatggaagtgaacttcaactttgatgatcccaacctcatcatcctgccactggcctttggcaagagacagggcagagaattcatctggaatgacctgctgagcctggaaacaggcagcctgaaactggccaatggcagagtgattgagaaaaccctgtacaacagaaggaccagacaggatgagcctgcactgtttgtggccctgacctttgagagaagggaagtgctggatagcagcaacatcaagcccatgaacctgattggagtggacagaggggagaatatccctgctgtcattgccctgacagaccctgagggctgtcccctgagcagattcaaggactccctgggcaaccccacacacattctgagaattggggagagctacaaagagaagcagagaaccatccaggccaagaaagaagtggaacagaggagagctggaggctactctaggaagtatgccagcaaagccaagaatctggctgatgacatggtcagaaacacagccagggacctgctgtactatgctgtgacccaggatgccatgctgatctttgagaatctgagcagaggatttgggagacaaggcaagaggaccttcatggctgaaagacagtacaccaggatggaagattggctgactgccaaactggcctatgagggactgcccagcaagacctacctgtccaagacactggcccagtatacctccaagacctgcagcaattgtggcttcaccatcacctctgcagactatgacagagtgctggaaaagctcaagaaaacagccacaggctggatgaccaccatcaatgggaaagagctgaaggttgagggccagatcacctactacaacagatacaaaaggcagaatgtggttaaggacctgtctgtggaactggacagactgtctgaggaatctgtgaacaatgacatcagcagctggaccaagggcagatctggggaagctctgagcctgctgaagaagagattcagccacagacctgtgcaagagaagtttgtgtgtctgaactgtggctttgagacacatgctgatgaacaggctgctctgaacattgccagaagctggctgttcctgagaagccaagagtacaagaagtaccagaccaacaagaccacaggcaacactgacaagagggcctttgtggaaacctggcagagcttctacagaaagaaactcaaagaagtctggaagcctgctgtg

SEQ ID NO: 9333 - DNA, 2934 bp, synthetic construct
  source 1..2934: mol_type = other DNA
caagagatcaagaggatcaacaagattagaagaaggctggtcaaggacagcaacaccaagaaggcaggcaagacaggccccatgaagaccctgcttgtcagagtgatgacccctgacctgagagagagactggaaaacctgagaaagaagcctgagaacatccctcagcctatctccaacaccagcagagccaacctgaacaagctgctgacagactacacagagatgaagaaagccatcctgcatgtgtactgggaagagttccagaaagaccctgtgggcctgatgagcagagtggcccagcctgccagcaagaagattgaccagaacaaactgaagccagagatggatgagaagggcaacctgaccacagctggctttgcctgctctcagtgtggccagcctctgtttgtgtacaagctggaacaagtgtctgagaaaggcaaggcctacaccaactactttggcagatgcaatgtggctgagcatgagaagctgatcaagctggcccagctgaagcctgaaaaggactctgatgaggctgtgacctacagcctgggcaagtttggacagagagccctggacttctacagcatccatgtgaccaaagaaagcacacaccctgtgaagcccctggctcagattgctggcaacagatatgcctctagccctgtgggcaaagccctgtctgatgcctgcatgggaaccattgccagctttctgagcaagtaccaggacatcatcattgagcaccagaaagtggtcaaggggaaccagaagaggctggaatctctgagagagctggctggcaaagagaacctggaatacccctctgtgaccctgcctcctcagcctcacaccaaagagggtgttgatgcctacaatgaagtgattgccagagtcaggatgtgggtcaacctgaatctgtggcagaagctgaagctgagcagggatgatgccaagcctctgctgagactgaagggcttccctagcttcccactggtggaaaggcaggctaatgaagtggattggtgggacatggtctgcaatgtgaagaaactgatcaatgagaagaaagaggatggcaaggttttctggcagaacctggctggctacaagaggcaagaagccctgaggccttacctgtcctctgaggaagataggaagaaggggaagaagtttgccagataccagctgggagatctgctgctgcacctggaaaagaaacatggggaagattggggcaaagtgtatgatgaggcctgggagagaattgacaagaaggtggaaggcctgagcaagcacattaagctggaagaggaaagaagatctgaggatgcccagagcaaggctgccctgactgattggctgagagccaaggccagctttgtgattgagggcctgaaagaggctgacaaggatgagttctgtagatgtgaactgaagctgcaaaagtggtatggggacctgaggggcaagccctttgccattgaggcagagaacagcatcctggacatcagtggcttcagcaagcagtacaactgtgccttcatttggcagaaggatggggttaagaagctcaacctgtacctgatcatcaactacttcaaaggtggcaagctgaggttcaagaagatcaagccagaggcctttgaggccaacaggttctacacagtgatcaacaaaaagtctggggagattgtgcccatggaagtgaacttcaactttgatgatcccaacctcatcatcctgccactggcctttggcaagagacagggcagagaattcatctggaatgacctgctgagcctggaaacaggcagcctgaaactggccaatggcagagtgattgagaaaaccctgtacaacagaaggaccagacaggatgagcctgcactgtttgtggccctgacctttgagagaagggaagtgctggatagcagcaacatcaagcccatgaacctgattggagtggacagaggggagaatatccctgctgtcattgccctgacagaccctgagggctgtcccctgagcagattcaaggactccctgggcaaccccacacacattctgagaattggggagagctacaaagagaagcagagaaccatccaggccaagaaagaagtggaacagaggagagctggaggctactctaggaagtatgccagcaaagccaagaatctggctgatgacatggtcagaaacacagccagggacctgctgtactatgctgtgacccaggatgccatgctgatctttgagaatctgagcagaggatttgggagacaaggcaagaggaccttcatggctgaaagacagtacaccaggatggaagattggctgactgccaaactggcctatgagggactgcccagcaagacctacctgtccaagacactggcccagtatacctccaagacctgcagcaattgtggcttcaccatcacctctgcagactatgacagagtgctggaaaagctcaagaaaacagccacaggctggatgaccaccatcaatgggaaagagctgaaggttgagggccagatcacctactacaacagatacaaaaggcagaatgtggttaaggacctgtctgtggaactggacagactgtctgaggaatctgtgaacaatgacatcagcagctggaccaagggcagatctggggaagctctgagcctgctgaagaagagattcagccacagacctgtgcaagagaagtttgtgtgtctgaactgtggctttgagacacatgctgatgaacaggctgctctgaacattgccagaagctggctgttcctgagaagccaagagtacaagaagtaccagaccaacaagaccacaggcaacactgacaagagggcctttgtggaaacctggcagagcttctacagaaagaaactcaaagaagtctggaagcctgctgtg

SEQ ID NO: 9334 - DNA, 99 bp, synthetic construct; identical to SEQ ID NO: 3638
  source 1..99: mol_type = other DNA

SEQ ID NO: 9335 - DNA, 89 bp, synthetic construct
  source 1..89: mol_type = other DNA
actggcgcttctatctgattactctgagcgccatcaccagcgactatgtcgtagtgggtaaagctccctcttcggagggagcatcagag

SEQ ID NO: 9336 - DNA, 119 bp, synthetic construct
  source 1..119: mol_type = other DNA
ctgctaacaaagcccgaaaggaagctgagttggctgctgccaccgctgagcaataactagcataaccccttggggcctctaaacgggtcttgaggggttttttgctgaaaggaggaact

SEQ ID NO: 9337 - DNA, 175 bp, synthetic construct
  source 1..175: mol_type = other DNA
tttctccataataatgtgtgagtagttcccagataagggaattagggttcctatagggtttcgctcatgtgttgagcatataagaaacccttagtatgtatttgtatttgtaaaatacttctatcaataaaatttctaattcctaaaaccaaaatccagtactaaaatccagatc

SEQ ID NO: 9338 - DNA, 171 bp, synthetic construct
  source 1..171: mol_type = other DNA
agctcgctgatcagcctcacaagaataaaggcagctgttgtctcttcagaagtagctttgcacttttctaaactaggaatatcaccaggactgttactcaatgtgtgctgcaggaaagcactgatatatttaaaaacaaaaggtgtaacctatttattatataaagagttt

SEQ ID NO: 9339 - DNA, 241 bp, synthetic construct
  source 1..241: mol_type = other DNA
gatccagacatgataagatacattgatgagtttggacaaaccacaactagaatgcagtgaaaaaaatgctttatttgtgaaatttgtgatgctattgctttatttgtaaccattataagctgcaataaacaagttaacaacaacaattgcattcattttatgtttcaggttcagggggaggtgtgggaggttttttaaagcaagtaaaacctctacaaatgtggtatggctgattatgatc

SEQ ID NO: 9340 - RNA, 20 nt, synthetic construct
  source 1..20: mol_type = other RNA
aaggggctccgcaccacgcc

SEQ ID NO: 9341 - RNA, 20 nt, synthetic construct
  source 1..20: mol_type = other RNA
tgtggtcggggtagcggctg

SEQ ID NO: 9342 - RNA, 20 nt, synthetic construct
  source 1..20: mol_type = other RNA
cgagacgtaattacgtctcg

SEQ ID NO: 9343 - RNA, 20 nt, synthetic construct
  source 1..20: mol_type = other RNA
agaagatgggcgggagtctt

SEQ ID NO: 9344 - DNA, 93 bp, synthetic construct
  source 1..93: mol_type = other DNA
tctaatcggattccaagcagctcaggggattgtctttttctagcaccttcttgccactcctaagcgtcctccgtgaccccggctgggatttag

SEQ ID NO: 9345 - DNA, 94 bp, synthetic construct
  source 1..94: mol_type = other DNA
tctcaggggatctaatcggattagcagctaggggattgtctttttctgcaccttctcctaaggtcctccgtgaccccggatttagtgtcagccc

SEQ ID NO: 9346 - DNA, 174 bp, synthetic construct
  source 1..174: mol_type = other DNA
tgtccttctcaggggaaaagtgaggcggccccttggaggaaggggccgggcagaatgatctaatcggattccaagcagctcaggggattgtctttttctagcaccttcttgccactcctaagcgtcctccgtgaccccggctgggatttagcctggtgctgtgtcagccccggg

SEQ ID NO: 9347 - DNA, 199 bp, synthetic construct
  source 1..199: mol_type = other DNA
gggccccagaagcctggtggttgtttgtccttctcaggggaaaagtgaggcggccccttggaggaaggggccgggcagaatgatctaatcggattccaagcagctcaggggattgtctttttctagcaccttcttgccactcctaagcgtcctccgtgaccccggctgggatttagcctggtgctgtgtcagccccggg

SEQ ID NO: 9348 - DNA, 241 bp, synthetic construct
  source 1..241: mol_type = other DNA
gggccccagaagcctggtggttgtttgtccttctcaggggaaaagtgaggcggccccttggaggaaggggccgggcagaatgatctaatcggattccaagcggctcaggggattgtctttttctagcaccttcttgccactcctaagcgtcctccgtgcttcccagtggtccccaggaaccctcgacagggcccggtctctctcgtccagcaagggcagggacgggccacaggccaagggc

SEQ ID NO: 9349 - DNA, 292 bp, synthetic construct; identical to SEQ ID NO: 3717
  source 1..292: mol_type = other DNA

SEQ ID NO: 9350 - DNA, 510 bp, synthetic construct; identical to SEQ ID NO: 3718
  source 1..510: mol_type = other DNA

SEQ ID NO: 9351 - DNA, 305 bp, synthetic construct
  source 1..305: mol_type = other DNA
cgccggccccctcgcacagacttgtgggagaagctcggctactcccctgccccggttaatttgcatataatatttcctagtaactatagaggcttaatgtgcgataaaagacagataatctgttctttttaatactagctacattttacatgataggcttggatttctataagagatacaaatactaaattattattttaaaaaacagcacaaaaggaaactcaccctaactgtaaagtaattgtgtgttttgagactataaatatcccttggagaaaagccttgtttgtcttcgagaagacctg

SEQ ID NO: 9352 - DNA, 2934 bp, synthetic construct
  source 1..2934: mol_type = other DNA
caagagatcaagagaatcaacaagatcagaaggagactggtcaaggacagcaacacaaagaaggccggcaagacaggccccatgaaaaccctgctcgtcagagtgatgacccctgacctgagagagcggctggaaaacctgagaaagaagcccgagaacatccctcagcctatcagcaacaccagcagggccaacctgaacaagctgctgaccgactacaccgagatgaagaaagccatcctgcacgtgtactgggaagagttccagaaagaccccgtgggcctgatgagcagagttgctcagcctgccagcaagaagatcgaccagaacaagctgaagcccgagatggacgagaagggcaatctgaccacagccggctttgcctgctctcagtgtggccagcctctgttcgtgtacaagctggaacaggtgtccgagaaaggcaaggcctacaccaactacttcggcagatgtaacgtggccgagcacgagaagctgattctgctggcccagctgaaacctgagaaggactctgatgaggccgtgacctacagcctgggcaagtttggacagagagccctggacttctacagcatccacgtgaccaaagaaagcacacaccccgtgaagcccctggctcagatcgccggcaatagatacgcctctggacctgtgggcaaagccctgtccgatgcctgcatgggaacaatcgccagcttcctgagcaagtaccaggacatcatcatcgagcaccagaaggtggtcaagggcaaccagaagagactggaaagcctgagggagctggccggcaaagagaacctggaataccccagcgtgaccctgcctcctcagcctcacacaaaagaaggcgtggacgcctacaacgaagtgatcgccagagtgagaatgtgggtcaacctgaacctgtggcagaagctgaaactgtccagggacgacgccaagcctctgctgagactgaagggcttccctagcttccctctggtggaaagacaggccaatgaagtggattggtgggacatggtctgcaacgtgaagaagctgatcaacgagaagaaagaggatggcaaggttttctggcagaacctggccggctacaagagacaagaagccctgaggccttacctgagcagcgaagaggaccggaagaagggcaagaagttcgccagataccagctgggcgacctgctgctgcacctggaaaagaagcacggcgaggactggggcaaagtgtacgatgaggcctgggagagaatcgacaagaaggtggaaggcctgagcaagcacattaagctggaagaggaaagaaggagcgaggacgcccaatctaaagccgctctgaccgattggctgagagccaaggccagctttgtgatcgagggcctgaaagaggccgacaaggacgagttctgcagatgcgagctgaagctgcagaagtggtacggcgatctgagaggcaagcccttcgccattgaggccgagaacagcatcctggacatcagcggcttcagcaagcagtacaactgcgccttcatttggcagaaagacggcgtcaagaaactgaacctgtacctgatcatcaattacttcaaaggcggcaagctgcggttcaagaagatcaaacccgaggccttcgaggctaacagattctacaccgtgatcaacaaaaagtccggcgagatcgtgcccatggaagtgaacttcaacttcgacgaccccaacctgattatcctgcctctggccttcggcaagagacagggcagagagttcatctggaacgatctgctgagcctggaaaccggctctctgaagctggccaatggcagagtgatcgagaaaaccctgtacaacaggagaaccagacaggacgagcctgctctgtttgtggccctgaccttcgagagaagagaggtgctggacagcagcaacatcaagcccatgaacctgatcggcgtggaccggggcgagaatatccctgctgtgatcgccctgacagaccctgaaggatgcccactgagcagattcaaggactccctgggcaaccctacacacatcctgagaatcggcgagagctacaaagagaagcagaggacaatccaggccaagaaagaggtggaacagagaagagccggcggatactctaggaagtacgccagcaaggccaagaatctggccgacgacatggtccgaaacaccgccagagatctgctgtactacgccgtgacacaggacgccatgctgatcttcgagaatctgagcagaggcttcggccggcagggcaagagaacctttatggccgagaggcagtacaccagaatggaagattggctcacagctaaactggcctacgagggactgcccagcaagacctacctgtccaaaacactggcccagtatacctccaagacctgcagcaattgcggcttcaccatcaccagcgccgactacgacagagtgctggaaaagctcaagaaaaccgccaccggctggatgaccaccatcaacggcaaagagctgaaggttgagggccagatcacctactacaacaggtacaagaggcagaacgtcgtgaaggatctgagcgtggaactggacagactgagcgaagagagcgtgaacaacgacatcagcagctggacaaagggcagatcaggcgaggctctgagcctgctgaagaagaggtttagccacagacctgtgcaagagaagttcgtgtgcctgaactgcggcttcgagacacacgccgatgaacaggctgccctgaacattgccagaagctggctgttcctgagaagccaagagtacaagaagtaccagaccaacaagaccaccggcaacaccgacaagagggcctttgtggaaacctggcagagcttctacagaaaaaagctgaaagaagtctggaagcccgccgtg

SEQ ID NO: 9353 - DNA, 27 bp, synthetic construct
  source 1..27: mol_type = other DNA
ccagccgcgaagcgagtgaaactggac

SEQ ID NO: 9354 - DNA, 20 bp, synthetic construct
  source 1..20: mol_type = other DNA
caagaggagaagcagtttgg

SEQ ID NO: 9355 - DNA, 90 bp, synthetic construct
  source 1..90: mol_type = other DNA
actggcgcttctatctgattactctgagccgccatcaccagcgactatgtcgtagtgggtaaagctccctcttcggagggagcatcagag

SEQ ID NO: 9356 - DNA, 99 bp, synthetic construct
  source 1..99: mol_type = other DNA
actgggccttctatctgattactctgaggcccatcaccagcgactatgtcgtagtgggtaaagccgcttacggacttcggtccgtaagaggcatcagag

SEQ ID NO: 9357 - RNA, 90 nt, synthetic construct
  source 1..90: mol_type = other RNA
actggcgcttctatctgattactctgagccgccatcaccagcgactatgtcgtagtgggtaaagctccctcttcggagggagcatcagag

SEQ ID NO: 9358 - RNA, 99 nt, synthetic construct
  source 1..99: mol_type = other RNA
actgggccttctatctgattactctgaggcccatcaccagcgactatgtcgtagtgggtaaagccgcttacggacttcggtccgtaagaggcatcagag

SEQ ID NO: 9359 - DNA, 33 bp, synthetic construct
  source 1..33: mol_type = other DNA
atggccccagcggccaaacgggtgaagctggac

SEQ ID NO: 9360 - DNA, 20 bp, synthetic construct
  source 1..20: mol_type = other DNA
ggccgagatgtctcgctccg

SEQ ID NO: 9361 - DNA, 2937 bp, synthetic construct; identical to SEQ ID NO: 3713
  source 1..2937: mol_type = other DNA

SEQ ID NO: 9362 - DNA, 2934 bp, synthetic construct
  source 1..2934: mol_type = other DNA
caagagatcaagagaatcaacaagatcagaaggagactggtcaaggacagcaacacaaagaaggccggcaagacaggccccatgaaaaccctgctcgtcagagtgatgacccctgacctgagagagcggctggaaaacctgagaaagaagcccgagaacatccctcagcctatcagcaacaccagcagggccaacctgaacaagctgctgaccgactacaccgagatgaagaaagccatcctgcacgtgtactgggaagagttccagaaagaccccgtgggcctgatgagcagagttgctcagcctgccagcaagaagatcgaccagaacaagctgaagcccgagatggacgagaagggcaatctgaccacagccggctttgcctgctctcagtgtggccagcctctgttcgtgtacaagctggaacaggtgtccgagaaaggcaaggcctacaccaactacttcggcagatgtaacgtggccgagcacgagaagctgattctgctggcccagctgaaacctgagaaggactctgatgaggccgtgacctacagcctgggcaagtttggacagagagccctggacttctacagcatccacgtgaccaaagaaagcacacaccccgtgaagcccctggctcagatcgccggcaatagatacgcctcttaccctgtgggcaaagccctgtccgatgcctgcatgggaacaatcgccagcttcctgagcaagtaccaggacatcatcatcgagcaccagaaggtggtcaagggcaaccagaagagactggaaagcctgagggagctggccggcaaagagaacctggaataccccagcgtgaccctgcctcctcagcctcacacaaaagaaggcgtggacgcctacaacgaagtgatcgccagagtgagaatgtgggtcaacctgaacctgtggcagaagctgaaactgtccagggacgacgccaagcctctgctgagactgaagggcttccctagcttccctctggtggaaagacaggccaatgaagtggattggtgggacatggtctgcaacgtgaagaagctgatcaacgagaagaaagaggatggcaaggttttctggcagaacctggccggctacaagagacaagaagccctgaggccttacctgagcagcgaagaggaccggaagaagggcaagaagttcgccagataccagctgggcgacctgctgctgcacctggaaaagaagcacggcgaggactggggcaaagtgtacgatgaggcctgggagagaatcgacaagaaggtggaaggcctgagcaagcacattaagctggaagaggaaagaaggagcgaggacgcccaatctaaagccgctctgaccgattggctgagagccaaggccagctttgtgatcgagggcctgaaagaggccgacaaggacgagttctgcagatgcgagctgaagctgcagaagtggtacggcgatctgagaggcaagcccttcgccattgaggccgagaacagcatcctggacatcagcggcttcagcaagcagtacaactgcgccttcatttggcagaaagacggcgtcaagaaactgaacctgtacctgatcatcaattacttcaaaggcggcaagctgcggttcaagaagatcaaacccgaggccttcgaggctaacagattctacaccgtgatcaacaaaaagtccggcgagatcgtgcccatggaagtgaacttcaacttcgacgaccccaacctgattatcctgcctctggccttcggcaagagacagggcagagagttcatctggaacgatctgctgagcctggaaaccggctctctgaagctggccaatggcagagtgatcgagaaaaccctgtacaacaggagaaccagacaggacgagcctgctctgtttgtggccctgaccttcgagagaagagaggtgctggacagcagcaacatcaagcccatgaacctgatcggcgtggaccggggcgagaatatccctgctgtgatcgccctgacagaccctgaaggatgcccactgagcagattcaaggactccctgggcaaccctacacacatcctgagaatcggcgagagctacaaagagaagcagaggacaatccaggccaagaaagaggtggaacagagaagagccggcggatactctaggaagtacgccagcaaggccaagaatctggccgacgacatggtccgaaacaccgccagagatctgctgtactacgccgtgacacaggacgccatgctgatcttcgagaatctgagcagaggcttcggccggcagggcaagagaacctttatggccgagaggcagtacaccagaatggaagattggctcacagctaaactggcctacgagggactgcccagcaagacctacctgtccaaaacactggcccagtatacctccaagacctgcagcaattgcggcttcaccatcaccagcgccgactacgacagagtgctggaaaagctcaagaaaaccgccaccggctggatgaccaccatcaacggcaaagagctgaaggttgagggccagatcacctactacaacaggtacaagaggcagaacgtcgtgaaggatctgagcgtggaactggacagactgagcgaagagagcgtgaacaacgacatcagcagctggacaaagggcagatcaggcgaggctctgagcctgctgaagaagaggtttagccacagacctgtgcaagagaagttcgtgtgcctgaactgcggcttcgagacacacgccgatgaacaggctgccctgaacattgccagaagctggctgttcctgagaagccaagagtacaagaagtaccagaccaacaagaccaccggcaacaccgacaagagggcctttgtggaaacctggcagagcttctacagaaaaaagctgaaagaagtctggaagcccgccgtg

SEQ ID NO: 9363 - DNA, 2934 bp, synthetic construct
  source 1..2934: mol_type = other DNA
caagagatcaagagaatcaacaagatcagaaggagactggtcaaggacagcaacacaaagaaggccggcaagacaggccccatgaaaaccctgctcgtcagagtgatgacccctgacctgagagagcggctggaaaacctgagaaagaagcccgagaacatccctcagcctatcagcaacaccagcagggccaacctgaacaagctgctgaccgactacaccgagatgaagaaagccatcctgcacgtgtactgggaagagttccagaaagaccccgtgggcctgatgagcagagttgctcagcctgccagcaagaagatcgaccagaacaagctgaagcccgagatggacgagaagggcaatctgaccacagccggctttgcctgctctcagtgtggccagcctctgttcgtgtacaagctggaacaggtgtccgagaaaggcaaggcctacaccaactacttcggcagatgtaacgtggccgagcacgagaagctgattaagctggcccagctgaaacctgagaaggactctgatgaggccgtgacctacagcctgggcaagtttggacagagagccctggacttctacagcatccacgtgaccaaagaaagcacacaccccgtgaagcccctggctcagatcgccggcaatagatacgcctcttaccctgtgggcaaagccctgtccgatgcctgcatgggaacaatcgccagcttcctgagcaagtaccaggacatcatcatcgagcaccagaaggtggtcaagggcaaccagaagagactggaaagcctgagggagctggccggcaaagagaacctggaataccccagcgtgaccctgcctcctcagcctcacacaaaagaaggcgtggacgcctacaacgaagtgatcgccagagtgagaatgtgggtcaacctgaacctgtggcagaagctgaaactgtccagggacgacgccaagcctctgctgagactgaagggcttccctagcttccctctggtggaaagacaggccaatgaagtggattggtgggacatggtctgcaacgtgaagaagctgatcaacgagaagaaagaggatggcaaggttttctggcagaacctggccggctacaagagacaagaagccctgaggccttacctgagcagcgaagaggaccggaagaagggcaagaagttcgccagataccagctgggcgacctgctgctgcacctggaaaagaagcacggcgaggactggggcaaagtgtacgatgaggcctgggagagaatcgacaagaaggtggaaggcctgagcaagcacattaagctggaagaggaaagaaggagcgaggacgcccaatctaaagccgctctgaccgattggctgagagccaaggccagctttgtgatcgagggcctgaaagaggccgacaaggacgagttctgcagatgcgagctgaagctgcagaagtggtacggcgatctgagaggcaagcccttcgccattgaggccgagaacagcatcctggacatcagcggcttcagcaagcagtacaactgcgccttcatttggcagaaagacggcgtcaagaaactgaacctgtacctgatcatcaattacttcaaaggcggcaagctgcggttcaagaagatcaaacccgaggccttcgaggctaacagattctacaccgtgatcaacaaaaagtccggcgagatcgtgcccatggaagtgaacttcaacttcgacgaccccaacctgattatcctgcctctggccttcggcaagagacagggcagagagttcatctggaacgatctgctgagcctggaaaccggctctctgaagctggccaatggcagagtgatcgagaaaaccctgtacaacaggagaaccagacaggacgagcctgctctgtttgtggccctgaccttcgagagaagagaggtgctggacagcagcaacatcaagcccatgaacctgatcggcgtggaccggggcgagaatatccctgctgtgatcgccctgacagaccctgaaggatgcccactgagcagattcaaggactccctgggcaaccctacacacatcctgagaatcggcgagagctacaaagagaagcagaggacaatccaggccaagaaagaggtggaacagagaagagccggcggatactctaggaagtacgccagcaaggccaagaatctggccgacgacatggtccgaaacaccgccagagatctgctgtactacgccgtgacacaggacgccatgctgatcttcgagaatctgagcagaggcttcggccggcagggcaagagaacctttatggccgagaggcagtacaccagaatggaagattggctcacagctaaactggcctacgagggactgcccagcaagacctacctgtccaaaacactggcccagtatacctccaagacctgcagcaattgcggcttcaccatcaccagcgccgactacgacagagtgctggaaaagctcaagaaaaccgccaccggctggatgaccaccatcaacggcaaagagctgaaggttgagggccagatcacctactacaacaggtacaagaggcagaacgtcgtgaaggatctgagcgtggaactggacagactgagcgaagagagcgtgaacaacgacatcagcagctggacaaagggcagatcaggcgaggctctgagcctgctgaagaagaggtttagccacagacctgtgcaagagaagttcgtgtgcctgaactgcggcttcgagacacacgccgatgaacaggctgccctgaacattgccagaagctggctgttcctgagaagccaagagtacaagaagtaccagaccaacaagaccaccggcaacaccgacaagagggcctttgtggaaacctggcagagcttctacagaaaaaagctgaaagaagtctggaagcccgccgtg

SEQ ID NO: 9364 - DNA, 2934 bp, synthetic construct
  source 1..2934: mol_type = other DNA
caagagatcaagagaatcaacaagatcagaaggagactggtcaaggacagcaacacaaagaaggccggcaagacaggccccatgaaaaccctgctcgtccccgtgatgacccctgacctgagagagcggctggaaaacctgagaaagaagcccgagaacatccctcagcctatcagcaacaccagcagggccaacctgaacaagctgctgaccgactacaccgagatgaagaaagccatcctgcacgtgtactgggaagagttccagaaagaccccgtgggcctgatgagcagagttgctcagcctgccagcaagaagatcgaccagaacaagctgaagcccgagatggacgagaagggcaatctgaccacagccggctttgcctgctctcagtgtggccagcctctgttcgtgtacaagctggaacaggtgtccgagaaaggcaaggcctacaccaactacttcggcagatgtaacgtggccgagcacgagaagctgattctgctggcccagctgaaacctgagaaggactctgatgaggccgtgacctacagcctgggcaagtttggacagagagccctggacttctacagcatccacgtgaccaaagaaagcacacaccccgtgaagcccctggctcagatcgccggcaatagatacgcctctggacctgtgggcaaagccctgtccgatgcctgcatgggaacaatcgccagcttcctgagcaagtaccaggacatcatcatcgagcaccagaaggtggtcaagggcaaccagaagagactggaaagcctgagggagctggccggcaaagagaacctggaataccccagcgtgaccctgcctcctcagcctcacacaaaagaaggcgtggacgcctacaacgaagtgatcgccagagtgagaatgtgggtcaacctgaacctgtggcagaagctgaaactgtccagggacgacgccaagcctctgctgagactgaagggcttccctagcttccctctggtggaaagacaggccaatgaagtggattggtgggacatggtctgcaacgtgaagaagctgatcaacgagaagaaagaggatggcaaggttttctggcagaacctggccggctacaagagacaagaagccctgaggccttacctgagcagcgaagaggaccggaagaagggcaagaagttcgccagataccagctgggcgacctgctgctgcacctggaaaagaagcacggcgaggactggggcaaagtgtacgatgaggcctgggagagaatcgacaagaaggtggaaggcctgagcaagcacattaagctggaagaggaaagaaggagcgaggacgcccaatctaaagccgctctgaccgattggctgagagccaaggccagctttgtgatcgagggcctgaaagaggccgacaaggacgagttctgcagatgcgagctgaagctgcagaagtggtacggcgatctgagaggcaagcccttcgccattgaggccgagaacagcatcctggacatcagcggcttcagcaagcagtacaactgcgccttcatttggcagaaagacggcgtcaagaaactgaacctgtacctgatcatcaattacttcaaaggcggcaagctgcggttcaagaagatcaaacccgaggccttcgaggctaacagattctacaccgtgatcaacaaaaagtccggcgagatcgtgcccatggaagtgaacttcaacttcgacgaccccaacctgattatcctgcctctggccttcggcaagagacagggcagagagttcatctggaacgatctgctgagcctggaaaccggctctctgaagctggccaatggcagagtgatcgagaaaaccctgtacaacaggagaaccagacaggacgagcctgctctgtttgtggccctgaccttcgagagaagagaggtgctggacagcagcaacatcaagcccatgaacctgatcggcgtggaccggggcgagaatatccctgctgtgatcgccctgacagaccctgaaggatgcccactgagcagattcaaggactccctgggcaaccctacacacatcctgagaatcggcgagagctacaaagagaagcagaggacaatccaggccaagaaagaggtggaacagagaagagccggcggatactctaggaagtacgccagcaaggccaagaatctggccgacgacatggtccgaaacaccgccagagatctgctgtactacgccgtgacacaggacgccatgctgatcttcgagaatctgagcagaggcttcggccggcagggcaagagaacctttatggccgagaggcagtacaccagaatggaagattggctcacagctaaactggcctacgagggactgcccagcaagacctacctgtccaaaacactggcccagtatacctccaagacctgcagcaattgcggcttcaccatcaccagcgccgactacgacagagtgctggaaaagctcaagaaaaccgccaccggctggatgaccaccatcaacggcaaagagctgaaggttgagggccagatcacctactacaacaggtacaagaggcagaacgtcgtgaaggatctgagcgtggaactggacagactgagcgaagagagcgtgaacaacgacatcagcagctggacaaagggcagatcaggcgaggctctgagcctgctgaagaagaggtttagccacagacctgtgcaagagaagttcgtgtgcctgaactgcggcttcgagacacacgccgatgaacaggctgccctgaacattgccagaagctggctgttcctgagaagccaagagtacaagaagtaccagaccaacaagaccaccggcaacaccgacaagagggcctttgtggaaacctggcagagcttctacagaaaaaagctgaaagaagtctggaagcccgccgtg

SEQ ID NO: 9365 - DNA, 2934 bp, synthetic construct
  source 1..2934: mol_type = other DNA
caagagatcaagagaatcaacaagatcagaaggagactggtcaaggacagcaacacaaagaaggccggcaagacaggccccatgaaaaccctgctcgtcagagtgatgacccctgacctgagagagcggctggaaaacctgagaaagaagcccgagaacatccctcagcctatcagcaacaccagcagggccaacctgaacaagctgctgaccgactacaccgagatgaagaaagccatcctgcacgtgtactgggaagagttccagaaagaccccgtgggcctgatgagcagagttgctcagcctgccagcaagaagatcgaccagaacaagctgaagcccgagatggacgagaagggcaatctgaccacagccggctttgcctgctctcagtgtggccagcctctgttcgtgtacaagctggaacaggtgtccgagaaaggcaaggcctacaccaactacttcggcagatgtaacgtggccgagcacgagaagctgattctgctggcccagctgaaacctgagaaggactctgatgaggccgtgacctacagcctgggcaagtttggacagagagccctggacttctacagcatccacgtgaccaaagaaagcacacaccccgtgaagcccctggctcagatcgccggcaatagatacgcctctggacctgtgggcaaagccctgtccgatgcctgcatgggaacaatcgccagcttcctgagcaagtaccaggacatcatcatcgagcaccagaaggtggtcaagggcaaccagaagagactggaaagcctgagggagctggccggcaaagagaacctggaataccccagcgtgaccctgcctcctcagcctcacacaaaagaaggcgtggacgcctacaacgaagtgatcgccagagtgagatggtgggtcaacctgaacctgtggcagaagctgaaactgtccagggacgacgccaagcctctgctgagactgaagggcttccctagcttccctctggtggaaagacaggccaatgaagtggattggtgggacatggtctgcaacgtgaagaagctgatcaacgagaagaaagaggatggcaaggttttctggcagaacctggccggctacaagagacaagaagccctgaggccttacctgagcagcgaagaggaccggaagaagggcaagaagttcgccagataccagctgggcgacctgctgctgcacctggaaaagaagcacggcgaggactggggcaaagtgtacgatgaggcctgggagagaatcgacaagaaggtggaaggcctgagcaagcacattaagctggaagaggaaagaaggagcgaggacgcccaatctaaagccgctctgaccgattggctgagagccaaggccagctttgtgatcgagggcctgaaagaggccgacaaggacgagttctgcagatgcgagctgaagctgcagaagtggtacggcgatctgagaggcaagcccttcgccattgaggccgagaacagcatcctggacatcagcggcttcagcaagcagtacaactgcgccttcatttggcagaaagacggcgtcaagaaactgaacctgtacctgatcatcaattacttcaaaggcggcaagctgcggttcaagaagatcaaacccgaggccttcgaggctaacagattctacaccgtgatcaacaaaaagtccggcgagatcgtgcccatggaagtgaacttcaacttcgacgaccccaacctgattatcctgcctctggccttcggcaagagacagggcagagagttcatctggaacgatctgctgagcctggaaaccggctctctgaagctggccaatggcagagtgatcgagaaaaccctgtacaacaggagaaccagacaggacgagcctgctctgtttgtggccctgaccttcgagagaagagaggtgctggacagcagcaacatcaagcccatgaacctgatcggcgtggaccggggcgagaatatccctgctgtgatcgccctgacagaccctgaaggatgcccactgagcagattcaaggactccctgggcaaccctacacacatcctgagaatcggcgagagctacaaagagaagcagaggacaatccaggccaagaaagaggtggaacagagaagagccggcggatactctaggaagtacgccagcaaggccaagaatctggccgacgacatggtccgaaacaccgccagagatctgctgtactacgccgtgacacaggacgccatgctgatcttcgagaatctgagcagaggcttcggccggcagggcaagagaacctttatggccgagaggcagtacaccagaatggaagattggctcacagctaaactggcctacgagggactgcccagcaagacctacctgtccaaaacactggcccagtatacctccaagacctgcagcaattgcggcttcaccatcaccagcgccgactacgacagagtgctggaaaagctcaagaaaaccgccaccggctggatgaccaccatcaacggcaaagagctgaaggttgagggccagatcacctactacaacaggtacaagaggcagaacgtcgtgaaggatctgagcgtggaactggacagactgagcgaagagagcgtgaacaacgacatcagcagctggacaaagggcagatcaggcgaggctctgagcctgctgaagaagaggtttagccacagacctgtgcaagagaagttcgtgtgcctgaactgcggcttcgagacacacgccgatgaacaggctgccctgaacattgccagaagctggctgttcctgagaagccaagagtacaagaagtaccagaccaacaagaccaccggcaacaccgacaagagggcctttgtggaaacctggcagagcttctacagaaaaaagctgaaagaagtctggaagcccgccgtg

SEQ ID NO: 9366 - DNA, 30 bp, synthetic construct
  source 1..30: mol_type = other DNA
actagtttagagctcgctgatcagcctcga

SEQ ID NO: 9367 - DNA, 20 bp, synthetic construct
  source 1..20: mol_type = other DNA
ccaaactgcttctcctcttg

SEQ ID NO: 9368 - DNA, 20 bp, synthetic construct
  source 1..20: mol_type = other DNA
cggagcgagacatctcggcc

SEQ ID NO: 9369 - DNA, 3006 bp, synthetic construct
  source 1..3006: mol_type = other DNA
atggctccagctgccaagagagtgaagctggactctagacaagagatcaagaggatcaacaagattagaagaaggctggtcaaggacagcaacaccaagaaggcaggcaagacaggccccatgaaaaccctgcttgtcagagtgatgacccctgacctgagagagagactggaaaacctgagaaagaagcctgagaacatccctcagcctatctccaacaccagcagagccaacctgaacaagctgctgacagactacacagagatgaagaaagccatcctgcatgtgtactgggaagagttccagaaagaccctgtgggcctgatgagcagagtggcccagcctgccagcaagaagattgaccagaacaaactgaagccagagatggatgagaagggcaacctgaccacagctggctttgcctgctctcagtgtggccagcctctgtttgtgtacaagctggaacaagtgtctgagaaaggcaaggcctacaccaactactttggcagatgcaatgtggctgagcatgagaagctgatcctgctggcccagctgaagcctgaaaaggactctgatgaggctgtgacctacagcctgggcaagtttggacagagagccctggacttctacagcatccatgtgaccaaagaaagcacacaccctgtgaagcccctggctcagattgctggcaacagatatgcctctggacctgtgggcaaagccctgtctgatgcctgcatgggaaccattgccagctttctgagcaagtaccaggacatcatcattgagcaccagaaagtggtcaaggggaaccagaagaggctggaatctctgagagagctggctggcaaagagaacctggaatacccctctgtgaccctgcctcctcagcctcacaccaaagagggtgttgatgcctacaatgaagtgattgccagagtcaggatgtgggtcaacctgaatctgtggcagaagctgaagctgagcagggatgatgccaagcctctgctgagactgaagggcttccctagcttcccactggtggaaaggcaggctaatgaagtggattggtgggacatggtctgcaatgtgaagaaactgatcaatgagaagaaagaggatggcaaggttttctggcagaacctggctggctacaagaggcaagaagccctgaggccttacctgtcctctgaggaagataggaagaaggggaagaagtttgccagataccagctgggagatctgctgctgcacctggaaaagaaacatggggaagattggggcaaagtgtatgatgaggcctgggagagaattgacaagaaggtggaaggcctgagcaagcacattaagctggaagaggaaagaagatctgaggatgcccagagcaaggctgccctgactgattggctgagagccaaggccagctttgtgattgagggcctgaaagaggctgacaaggatgagttctgtagatgtgaactgaagctgcaaaagtggtatggggacctgaggggcaagccctttgccattgaggcagagaacagcatcctggacatcagtggcttcagcaagcagtacaactgtgccttcatttggcagaaggatggggttaagaagctcaacctgtacctgatcatcaactacttcaaaggtggcaagctgaggttcaagaagatcaagccagaggcctttgaggccaacaggttctacacagtgatcaacaaaaagtctggggagattgtgcctatggaagtgaacttcaactttgatgatcccaacctcatcatcctgccactggcctttggcaagagacagggcagagaattcatctggaatgacctgctgagcctggaaacaggcagcctgaaactggccaatggcagagtgattgagaaaaccctgtacaacagaaggaccagacaggatgagcctgcactgtttgtggccctgacctttgagagaagggaagtgctggatagcagcaacatcaagcccatgaacctgattggagtggacagaggggagaatatccctgctgtcattgccctgacagaccctgagggctgtcccctgagcagattcaaggactccctgggcaaccccacacacattctgagaattggggagagctacaaagagaagcagagaaccatccaggccaagaaagaagtggaacagaggagagctggaggctactctaggaagtatgccagcaaagccaagaatctggctgatgacatggtcagaaacacagccagggacctgctgtactatgctgtgacccaggatgccatgctgatctttgagaatctgagcagaggatttgggagacaaggcaagaggaccttcatggctgaaagacagtacaccaggatggaagattggctgactgccaaactggcctatgagggactgcccagcaagacctacctgtccaagacactggcccagtatacctccaagacctgcagcaattgtggcttcaccatcacctctgcagactatgacagagtgctggaaaagctcaagaaaacagccacaggctggatgaccaccatcaatgggaaagagctgaaggttgagggccagatcacctactacaacagatacaaaaggcagaatgtggttaaggacctgtctgtggaactggacagactgtctgaggaatctgtgaacaatgacatcagcagctggaccaagggcagatctggggaagctctgagcctgctgaagaagagattcagccacagacctgtgcaagagaagtttgtgtgtctgaactgtggctttgagacacatgctgatgaacaggctgctctgaacattgccagaagctggctgttcctgagaagccaagagtacaagaagtaccagaccaacaagaccacaggcaacactgacaagagggcctttgtggaaacctggcagagcttctacagaaagaaactcaaagaagtctggaagcctgctgtgggatcccctgcagctaaaagggtcaagctggac

SEQ ID NO: 9370 - DNA, 3006 bp, synthetic construct
  source 1..3006: mol_type = other DNA
atggcccctgcagcaaaaagagtgaaactggactccagacaagagatcaagagaatcaacaagatcaggagaagactggtgaaagacagcaacaccaagaaagcaggcaagacaggtcctatgaagaccctgctggtgagagtgatgacccctgatctgagagaaagactggaaaacctgagaaagaagccagagaacattccccagcctatctctaataccagcagagccaatctgaacaaactgctgacagactacacagagatgaaaaaggccatcctgcatgtgtactgggaggaattccagaaggatccagtgggccttatgagcagagtggcccagcctgctagcaagaaaatagaccagaacaagctgaagcctgagatggatgagaagggcaacctgaccacagctggatttgcctgcagccagtgtggccagcccctgtttgtgtacaagctggaacaggtgagtgagaagggcaaggcttacacaaactactttggcagatgcaatgtggctgagcatgagaaactgatcctgctggctcagctgaaacctgagaaagactctgatgaggcagtgacctacagcctgggcaagtttggccaaagagccctggacttctacagcatccatgtgaccaaggagagcacccacccagtgaagcctctggcccaaattgctggcaatagatatgcctcaggccctgttggaaaggccctgtcagatgcttgcatgggcacaattgctagcttcctgtccaagtaccaggacatcatcattgagcaccagaaggttgtgaaggggaaccagaaaagactggagtcactgagagagctggcaggcaaagaaaacctggagtacccatcagtgacactgccacctcagccccacaccaaggaaggagttgatgcatacaatgaggtgattgccagagtgagaatgtgggtgaacctcaacctgtggcagaagctaaaactgagcagagatgatgccaagccactgctgagactgaagggctttcctagcttccctctggtggagagacaggccaatgaagtggactggtgggacatggtctgcaatgtgaagaagttgatcaatgagaagaaggaggatggcaaggttttctggcaaaacttggcaggctataagagacaggaagctctgagaccttacctgagcagtgaggaggacagaaagaagggaaagaagtttgccagataccaactgggtgacctgctgctgcatctggaaaagaagcatggggaagattggggcaaggtgtatgatgaggcctgggaaaggattgacaaaaaggttgaaggcctgtccaaacatatcaagctggaagaggagagaagatctgaggatgcccagagcaaggctgccctgacagactggctgagagccaaggcctcttttgtgatagagggcctgaaggaagctgataaggatgagttctgcagatgtgagctgaagctccagaaatggtatggtgatctgagaggcaagccttttgccatagaggctgagaatagcatcttggacatctctggatttagcaagcagtacaactgtgcctttatctggcaaaaagatggagtgaagaaactcaacctgtacctgatcataaactactttaaaggtggcaagctgagatttaagaagatcaagcctgaagcctttgaggccaatagattctacacagtgattaacaagaaaagtggggagattgtgcccatggaagtgaacttcaactttgatgaccccaacctcattatccttcctctggcctttggcaagagacagggaagagagttcatctggaatgacctactgagcctggagacaggcagcctgaaacttgccaatggcagagtgattgaaaagaccctgtacaacagaagaacaagacaggatgagcctgcactgtttgtggccctgacatttgagagaagagaagtcctggattcttctaacatcaagcctatgaacctgataggtgtggataggggtgaaaacatccctgctgtgatagcactgacagaccctgagggctgccctctgtctagattcaaggacagcctgggaaaccccacccacatcctgagaattggagagagctacaaagagaagcagagaaccattcaggccaagaaggaggttgagcagagaagagctggtggctacagcagaaagtatgccagcaaggccaagaacctggcagatgacatggtgagaaacacagctagagatctgctgtactatgcagtgacccaggatgctatgctgatctttgagaatctgtctagaggctttggcagacagggcaagagaacctttatggcagaaagacagtatacaagaatggaagattggctgacagccaagctggcttatgagggcctgccaagcaagacctacctgtctaagaccctggcccagtacacctccaagacctgtagcaactgtggcttcaccatcacctctgcagactatgacagagtgctggaaaagctcaagaagactgccacaggctggatgaccactatcaatggcaaggaactgaaagtggaagggcagatcacatattacaacagatataagagacagaatgtggtgaaggacctgtcagtggaactggatagactgtctgaggaaagtgtcaacaatgacatcagctcttggaccaagggcagatctggagaggccctcagcctgctgaagaagagattcagccacagacctgtgcaggaaaaatttgtgtgtctgaactgtggctttgagacacatgctgatgagcaggcagctctgaatatagccagatcctggctgtttctgagaagccaagagtacaaaaaataccagaccaacaagaccacaggaaacacagacaagagagcctttgtggaaacctggcagagcttctacagaaagaagctgaaggaagtgtggaaacctgctgtgggatctcctgcagccaagagagtgaagctggac

SEQ ID NO: 9371 - DNA, 3006 bp, synthetic construct
  source 1..3006: mol_type = other DNA
atggccccagcagccaagagagtgaagctggacagcagacaagagatcaagaggatcaacaagatcagaagaaggctggtgaaggacagcaacaccaagaaggctggcaagacaggccccatgaaaaccctgctggtgagagtgatgaccccagacctgagagagagactggagaacctgagaaagaagccagagaacatcccccagcctatcagcaacaccagcagagccaacctgaacaagctgctgacagactacacagagatgaagaaggccatcctgcatgtgtactgggaggagttccaaaaagaccctgtgggcctgatgagcagagtggcccagcctgctagcaagaagattgaccagaacaagctgaagcctgagatggatgagaagggcaatctgaccacagctggatttgcctgtagccagtgtggccagcctctgtttgtgtacaagctggagcaagtgtcagagaagggcaaggcctacaccaactactttggcagatgcaatgtggctgagcatgagaagctgatcctgctggcccagctgaagcctgaaaaggacagtgatgaggctgtgacctacagcctgggcaagtttggacagagagccctggacttctacagcatccatgtgaccaaggagagcacacaccctgtgaaacccctggctcagatagctggcaacagatatgctagtggacctgtgggcaaagccctgtcagatgcctgcatgggaacaattgctagcttcctgagcaagtaccaggacatcatcatagagcaccagaaggtggtgaagggcaaccagaagaggctggaaagcctgagagagctggctggcaaggagaatctggaatacccttcagtgaccctgcctcctcagcctcataccaaagagggagtggatgcctacaatgaggtgattgccagagtgaggatgtgggtgaacctgaacctgtggcagaagctgaagctgagcagggatgatgccaagcctctgctgagactgaagggcttccctagcttccctctggtggaaaggcaggccaatgaagtggattggtgggacatggtgtgcaatgtgaagaagctgatcaatgagaagaaggaggatggcaaggtgttctggcagaacctggctggctataagaggcaagaagccctgaggccttacctgagcagtgaggaggacaggaagaagggcaagaagtttgccagataccagctgggagatctgctgctgcacctggagaagaagcatggtgaagattggggcaaggtgtatgatgaggcctgggagagaatagacaagaaggtggagggcctgagcaagcacatcaagctggaggaggagagaagaagtgaggatgcccaaagcaaggctgccctgacagattggctgagagccaaggccagctttgtgattgagggcctgaaagaggctgacaaggatgagttctgcagatgtgagctgaagctgcaaaagtggtatggagacctgaggggcaagccctttgccattgaggctgagaacagcatcctggacatctctggcttcagcaagcagtacaactgtgccttcatctggcagaaggatggagtgaagaagctgaacctgtacctgatcatcaactacttcaagggtggcaagctgaggttcaagaagatcaagcctgaggcctttgaggccaacaggttctacacagtgatcaacaagaagtcaggggagattgtgcccatggaggtgaacttcaactttgatgaccccaacctgatcatcctgcctctggcctttggcaagagacagggcagagagttcatctggaatgacctgctgagcctggaaacaggcagcctgaaactggccaatggcagagtgattgagaagaccctgtacaacagaaggaccagacaggatgagcctgctctgtttgtggccctgacctttgagagaagggaagtgctggacagcagcaacatcaagcccatgaacctgattggggtggacagaggggagaacatccctgctgtgattgccctgacagatcctgagggctgtcctctgagcagattcaaggacagcctgggaaaccccacccacatcctgagaattggagagagctacaaggagaagcagagaaccatccaggccaagaaggaggtggaacagaggagagctggaggctacagcaggaagtatgccagcaaggccaagaacctggctgatgacatggtgagaaacacagccagggacctgctgtactatgctgtgacccaggatgccatgctgatctttgagaacctgagcagaggctttggcagacagggcaagaggaccttcatggctgagagacagtacaccaggatggaggattggctgacagccaaactggcctatgagggactgcccagcaagacctacctgagcaagacactggctcagtacaccagcaagacctgcagcaactgtggcttcaccatcacctcagctgactatgacagagtgctggagaagctgaagaagacagccacaggctggatgaccaccatcaatggcaaagagctgaaggtggagggccagatcacctactacaacagatacaagaggcagaatgtggtgaaggacctgagtgtggaactggacagactgtcagaggaatcagtgaacaatgacatcagcagctggacaaagggcagatcaggggaagctctgagcctgctgaagaagagattcagccacagaccagtgcaggagaagtttgtgtgcctgaactgtggctttgagacccatgcagatgaacaggctgctctgaacatagccagaagctggctgttcctgagaagccaggagtacaagaagtaccagaccaacaagaccactggcaacactgacaagagggcctttgtggaaacctggcagagcttctacagaaagaagctgaaggaggtgtggaagcctgctgtgggaagccctgctgctaaaagggtgaagctggac

SEQ ID NO: 9372 - DNA, 3006 bp, synthetic construct
  source 1..3006: mol_type = other DNA
atggccccagcagccaagagagtgaagctggacagcagacaggagatcaagagaatcaacaagatcagaagaagactggtgaaggacagcaacaccaagaaggcaggcaagacaggccccatgaagaccctgctggtgagagtgatgacccctgacctgagagagagactggagaacctgagaaagaagccagagaacatcccccagcccatcagcaacaccagcagagccaacctgaacaagctgctgactgactacacagagatgaagaaggccatcctgcatgtgtactgggaggagttccagaaggacccagtgggcctgatgagcagagtggcccagccagccagcaagaagatagaccagaacaagctgaagccagagatggatgagaagggcaacctgaccacagcaggctttgcctgcagccagtgtggccagcccctgtttgtgtacaagctggagcaggtgtcagagaagggcaaggcctacaccaactactttggcagatgcaatgtggcagagcatgagaagctgatcctgctggcccagctgaagccagagaaggactctgatgaggcagtgacctacagcctgggcaagtttggccagagagccctggacttctacagcatccatgtgaccaaggagagcacccacccagtgaagcccctggcccagatagcaggcaacagatatgccagtggcccagtgggcaaggccctgtctgatgcctgcatgggcaccattgccagcttcctgagcaagtaccaggacatcatcatagagcaccagaaggtggtgaagggcaaccagaagagactggagagcctgagagagctggcaggcaaggagaacctggagtaccccagtgtgaccctgcccccccagccccacaccaaggagggggtggatgcctacaatgaggtgattgccagagtgagaatgtgggtgaacctgaacctgtggcagaagctgaagctgagcagagatgatgccaagcccctgctgagactgaagggcttccccagcttccccctggtggagagacaggccaatgaggtggactggtgggacatggtgtgcaatgtgaagaagctgatcaatgagaagaaggaggatggcaaggtgttctggcagaacctggcaggctacaagagacaggaggccctgagaccctacctgagcagtgaggaggacagaaagaagggcaagaagtttgccagataccagctgggggacctgctgctgcacctggagaagaagcatggggaggactggggcaaggtgtatgatgaggcctgggagagaattgacaagaaggtggagggcctgagcaagcacatcaagctggaggaggagagaagaagtgaggatgcccagagcaaggcagccctgactgactggctgagagccaaggccagctttgtgatagagggcctgaaggaggctgacaaggatgagttctgcagatgtgagctgaagctgcagaagtggtatggggacctgagaggcaagccctttgccattgaggctgagaacagcatcctggacatctcaggcttcagcaagcagtacaactgtgccttcatctggcagaaggatggggtgaagaagctgaacctgtacctgatcatcaactacttcaagggaggcaagctgagattcaagaagatcaagccagaggcctttgaggccaacagattctacactgtgatcaacaagaagtctggtgagatagtgcccatggaggtgaacttcaactttgatgaccccaacctgatcatcctgcccctggcctttggcaagagacagggcagagagttcatctggaatgacctgctgagcctggagacaggcagcctgaagctggccaatggcagagtgattgagaagaccctgtacaacagaagaaccagacaggatgagccagccctgtttgtggccctgacctttgagagaagagaggtgctggacagcagcaacatcaagcccatgaacctgataggagtggacagaggtgagaacatccctgcagtgatagccctgacagaccctgagggctgccccctgagcagattcaaggacagcctgggcaaccccacccacatcctgagaattggggagagctacaaggagaagcagagaaccatccaggccaagaaggaggtggagcagagaagagcagggggctacagcagaaagtatgccagcaaggccaagaacctggcagatgacatggtgagaaacacagccagagacctgctgtactatgcagtgacccaggatgccatgctgatctttgagaacctgagcagaggctttggcagacagggcaagagaaccttcatggcagagagacagtacaccagaatggaggactggctgacagccaagctggcctatgagggcctgcccagcaagacctacctgagcaagaccctggcccagtacaccagcaagacctgcagcaactgtggcttcaccatcacctcagctgactatgacagagtgctggagaagctgaagaagactgccactggctggatgaccaccatcaatggcaaggagctgaaggtggagggccagatcacctactacaacagatacaagagacagaatgtggtgaaggacctgagtgtggagctggacagactgtctgaggagtctgtgaacaatgacatcagcagctggaccaagggcagatctggagaggccctgagcctgctgaagaagagattcagccacagaccagtgcaggagaagtttgtgtgcctgaactgtggctttgagacccatgcagatgagcaggcagccctgaacatagccagaagctggctgttcctgagaagccaggagtacaagaagtaccagaccaacaagaccacaggcaacacagacaagagagcctttgtggagacctggcagagcttctacagaaagaagctgaaggaggtgtggaagccagcagtgggcagccctgcagccaagagagtgaagctggac

SEQ ID NO: 9373 - DNA, 3006 bp, synthetic construct
  source 1..3006: mol_type = other DNA
atggccccagctgccaagagagtgaagctggacagcagacaggagatcaagaggatcaacaagatcagaagaaggctggtgaaggacagcaacaccaagaaggcaggcaagactggccccatgaagaccctgctggtgagagtgatgaccccagacctgagagagagactggagaacctgagaaagaagccagagaacatcccccagcccatcagcaacaccagcagagccaacctgaacaagctgctgacagactacactgagatgaagaaggccatcctgcatgtgtactgggaggagttccagaaggacccagtgggcctgatgagcagagtggcccagcctgccagcaagaagatagaccagaacaagctgaagccagagatggatgagaagggcaacctgaccacagctggctttgcctgcagccagtgtggccagcccctgtttgtgtacaagctggagcaggtgtcagagaagggcaaggcctacaccaactactttggcagatgcaatgtggcagagcatgagaagctgatcctgctggcccagctgaagccagagaaggacagtgatgaggcagtgacctacagcctgggcaagtttggccagagagccctggacttctacagcatccatgtgaccaaggagagcacccacccagtgaagcccctggcccagattgcaggcaacagatatgcctcaggcccagtgggcaaggccctgtctgatgcctgcatgggcaccatagccagcttcctgagcaagtaccaggacatcatcatagagcaccagaaggtggtgaagggcaaccagaagaggctggagagcctgagagagctggctggcaaggagaacctggagtacccctcagtgaccctgcccccccagccccacaccaaggagggtgtggatgcctacaatgaggtgattgccagagtgaggatgtgggtgaacctgaacctgtggcagaagctgaagctgagcagggatgatgccaagcccctgctgagactgaagggcttccccagcttccccctggtggagaggcaggccaatgaggtggactggtgggacatggtgtgcaatgtgaagaagctgatcaatgagaagaaggaggatggcaaggtgttctggcagaacctggcaggctacaagaggcaggaggccctgaggccctacctgagcagtgaggaggacaggaagaagggcaagaagtttgccagataccagctgggagacctgctgctgcacctggagaagaagcatggggaggactggggcaaggtgtatgatgaggcctgggagagaatagacaagaaggtggagggcctgagcaagcacatcaagctggaggaggagagaagatcagaggatgcccagagcaaggcagccctgacagactggctgagagccaaggccagctttgtgattgagggcctgaaggaggcagacaaggatgagttctgcagatgtgagctgaagctgcagaagtggtatggagacctgaggggcaagccctttgccattgaggcagagaacagcatcctggacatctcaggcttcagcaagcagtacaactgtgccttcatctggcagaaggatggagtgaagaagctgaacctgtacctgatcatcaactacttcaagggtggcaagctgaggttcaagaagatcaagcctgaggcctttgaggccaacaggttctacactgtgatcaacaagaagtctggtgagatagtgcccatggaggtgaacttcaactttgatgaccccaacctgatcatcctgcccctggcctttggcaagagacagggcagagagttcatctggaatgacctgctgagcctggagacaggcagcctgaagctggccaatggcagagtgattgagaagaccctgtacaacagaaggaccagacaggatgagcctgccctgtttgtggccctgacctttgagagaagggaggtgctggacagcagcaacatcaagcccatgaacctgataggggtggacagaggagagaacatcccagcagtgatagccctgacagacccagagggctgccccctgagcagattcaaggacagcctgggcaaccccacccacatcctgagaattggggagagctacaaggagaagcagagaaccatccaggccaagaaggaggtggagcagaggagagctggaggctacagcaggaagtatgccagcaaggccaagaacctggctgatgacatggtgagaaacacagccagggacctgctgtactatgctgtgacccaggatgccatgctgatctttgagaacctgagcagaggctttggcagacagggcaagaggaccttcatggctgagagacagtacaccaggatggaggactggctgacagccaagctggcctatgagggcctgcccagcaagacctacctgagcaagaccctggcccagtacaccagcaagacctgcagcaactgtggcttcaccatcacctctgcagactatgacagagtgctggagaagctgaagaagactgccactggctggatgaccaccatcaatggcaaggagctgaaggtggagggccagatcacctactacaacagatacaagaggcagaatgtggtgaaggacctgtctgtggagctggacagactgtctgaggagagtgtgaacaatgacatcagcagctggaccaagggcagaagtggggaggccctgagcctgctgaagaagagattcagccacagaccagtgcaggagaagtttgtgtgcctgaactgtggctttgagacccatgctgatgagcaggcagccctgaacatagccagaagctggctgttcctgagaagccaggagtacaagaagtaccagaccaacaagaccacaggcaacactgacaagagggcctttgtggagacctggcagagcttctacagaaagaagctgaaggaggtgtggaagccagcagtgggcagcccagcagccaagagggtgaagctggac

SEQ ID NO: 9374 - DNA, 3006 bp, synthetic construct
  source 1..3006: mol_type = other DNA
atggctccagctgctaagagagtgaaactggactccaggcaggaaattaaaagaatcaacaagatcaggagaaggctggtcaaagatagcaacaccaagaaggcagggaagacaggccctatgaaaaccctgctggtgagagtgatgacacctgatctgagagaaagactggagaatctgagaaagaagccagagaatatcccccagcctatctctaacacatccagagccaacctgaataagctgctgactgattacactgagatgaagaaagcaattctgcatgtgtactgggaggaattccagaaagatccagtgggcctgatgtctagagtggcccagcctgctagtaaaaagattgatcagaacaagctcaagcctgagatggatgagaaggggaacctgaccacagcaggatttgcctgcagccagtgtggccagcccctgtttgtgtacaagctggaacaggtgtcagaaaaaggcaaggcctacactaattactttggtagatgcaatgtggctgagcatgagaagctgatcctgctggcccagctgaagcctgagaaggattcagatgaggcagtgacctattccctgggcaagtttggacagagggccctggatttttatagcatccatgtcaccaaggagagcactcatccagtgaagccactggcccagatagcaggaaacagatatgcttctggaccagttggcaaggcactgtcagatgcctgcatgggcacaatagccagcttcctgtccaagtaccaggacatcattattgagcaccagaaggtggtcaagggaaatcagaagaggctggagtccctcagagaactggctggtaaagagaacctggaatatcctagtgtgactctgcccccacagccccacaccaaggagggggtggatgcctataatgaggtcatagctagagtgagaatgtgggtgaatctgaatctgtggcagaagctcaagctgtcaagagatgatgccaagcctctcctgagactgaaggggttcccaagcttcccactggtggaaagacaggccaatgaggtggattggtgggacatggtctgcaatgtgaagaagctgatcaatgaaaagaaggaggatggcaaagtgttttggcagaacctggctggctacaagaggcaggaggccctgaggccctacctttcctcagaggaggatagaaagaagggcaagaagtttgccagataccagctgggtgatctgctgctgcacctggagaagaagcatggggaagactggggaaaggtgtatgatgaggcctgggagagaattgacaagaaagtggaggggctgagcaagcacatcaaactggaggaagaaagaagaagtgaagatgctcagtctaaagcagccctgacagactggctgagagccaaagccagctttgtcatagaaggcctgaaggaggctgacaaggatgagttctgcagatgtgagctgaaactgcagaagtggtatggggacctgagaggcaagccctttgccatagaggcagaaaactccatcctggatatcagtgggttctccaagcagtacaattgtgccttcatctggcagaaggatggagtgaagaaactgaatctgtatctgatcatcaattactttaaaggggggaaactgagattcaagaagatcaaaccagaggcctttgaggccaatagattctatacagtgatcaacaagaaatctggagagattgtgccaatggaggtgaattttaactttgatgaccccaacctgatcatcctgcctctggcctttggcaaaagacagggcagggagtttatctggaatgatctgctgtcactggaaacagggagcctgaagctggccaatgggagagtgattgaaaagacactgtataacagaagaactagacaggatgagccagctctgtttgtggccctgacctttgagagaagagaggtgttggattcatctaacataaaacccatgaacctgattggggtggacagaggggagaacattccagctgtgattgccctgactgacccagagggctgccctctgagcagattcaaggatagcctgggcaatcccactcatattctgagaattggggaaagctataaagaaaagcaaagaactatccaggctaagaaggaagtggagcagaggagagcaggaggctacagcagaaagtatgcctccaaggctaagaatctggcagatgacatggtgaggaacactgctagagacctgctgtactatgcagtgacccaggatgccatgctgatctttgagaacctcagcagaggctttgggagacagggcaagagaaccttcatggcagagagacagtataccagaatggaggattggctgacagccaagctggcctatgagggcttgcccagtaaaacctacctgagcaaaaccctggcacagtacaccagcaagacatgttcaaactgtggattcaccatcacctctgcagactatgatagggtgctggagaagctcaaaaagactgccacaggctggatgacaaccatcaatggaaaggagctgaaggtggaaggccagatcacatattataacagatataagaggcagaatgtggtgaaggacctgtctgtggagctggacagactgtcagaggaatctgtgaataatgacatcagctcttggaccaaagggagatctggagaagccctgtccctgctgaaaaaaagattctctcacagacctgtgcaggaaaagtttgtgtgcctgaattgtggctttgagacccatgcagatgagcaggctgccctgaatatagccagatcctggctgtttctgagatcccaggagtataagaagtaccagaccaacaagacaacaggcaatactgacaagagagcctttgtggagacatggcagagcttttacagaaagaagctgaaggaggtgtggaagcctgcagtggggagccctgctgccaagagagtcaagctggac

SEQ ID NO: 9375 - DNA, 3006 bp, synthetic construct
  source 1..3006: mol_type = other DNA
atggcccctgctgccaaaagagtgaagctggattctagacaagagatcaagaggatcaacaagatcaggagaaggctggtgaaggatagcaacaccaaaaaagctggcaaaacaggacccatgaaaacactgcttgttagggtgatgacacctgatcttagggagagactggagaaccttaggaaaaaacctgagaacatccctcagcctatcagcaatacaagcagagccaatctgaacaagctgctgactgactacacagagatgaagaaagccattctgcatgtgtactgggaggagttccaaaaagaccctgtgggattgatgtctagagttgctcagcctgctagcaagaagattgaccagaacaagctgaagcctgagatggatgagaaaggaaatttaacaacagctggctttgcctgctctcagtgtggccaacctctgtttgtttataagctggagcaagtgtcagagaaaggcaaggcctacaccaattactttggaagatgcaatgtggctgagcatgagaaacttattctgctggcccaactgaaacctgagaaggactctgatgaagctgtgacatatagcttgggaaagtttggccagagggccttggacttttacagcatccatgttaccaaggaatctacacaccctgtgaagcccttagctcagattgctggaaataggtatgcttctggacctgtgggaaaagctctttctgatgcctgtatgggaacaattgccagcttcttgagcaagtaccaggacatcatcatagaacaccagaaggtggtgaaaggaaaccagaagaggctggaatctttaagggagcttgctggcaaagaaaacctggagtatccttctgttacacttccccctcaacctcataccaaagagggagttgatgcctacaatgaagtgattgccagagtgagaatgtgggtgaacctgaacttgtggcaaaagctgaagcttagcagagatgatgccaagcccttactgagacttaagggcttccctagctttcctttagtggaaaggcaagctaatgaagtggattggtgggacatggtgtgcaatgtgaagaagctgatcaatgagaagaaggaggatggaaaggtgttctggcagaatttggctggatacaaaaggcaagaagctctgaggccttacttgagctctgaagaggacagaaagaagggcaagaagtttgccagataccagcttggagatcttctgttacacctggaaaagaaacatggagaagattggggcaaagtgtatgatgaggcctgggagagaattgacaaaaaggtggaaggccttagcaagcacatcaaacttgaggaagagagaagatcagaggatgctcaatctaaagctgctctgacagattggctgagagctaaggcctcttttgtgattgaaggcttgaaagaggctgacaaggatgagttctgtaggtgtgaacttaaactgcagaagtggtatggagatctgaggggaaaaccctttgccattgaagctgagaactctatcctggacatctctggcttcagcaagcaatacaactgtgccttcatttggcagaaggatggggttaagaagctgaacctgtacctgatcatcaactacttcaaaggaggcaagctgaggttcaagaagatcaaacctgaggcttttgaggccaacaggttctacacagtgatcaacaaaaagtctggtgagattgtgcccatggaggtgaacttcaattttgatgatcccaatctgattatccttcctttggcctttggcaagagacagggcagagaattcatctggaatgacctgcttagcttagaaacaggaagcctgaaactggccaatggcagagtgattgagaaaaccctgtacaacagaaggaccagacaagatgaacctgctctgtttgtggctctgacctttgagagaagggaggttttggatagcagcaacatcaagcccatgaatctgattggagtggatagaggtgaaaatattcctgctgtgattgctctgacagatcctgaaggctgtcccttaagcagattcaaagattctcttggcaaccccacacacattctgagaattggagagagctacaaagagaagcagagaaccattcaggctaagaaagaagtggaacagaggagagctggaggatactctaggaagtatgcctctaaagccaagaatttggctgatgatatggtgagaaatacagccagggacctgctgtattatgctgttacacaggatgctatgctgatctttgagaacctgagcagaggatttggcagacaaggaaagaggacctttatggctgagagacagtacaccaggatggaagattggttaacagccaagttagcttatgagggactgcctagcaagacctaccttagcaaaacactggctcagtataccagcaagacctgcagcaactgtggattcaccattacctctgctgactatgacagagtgctggaaaagctgaaaaaaacagccacaggctggatgaccacaatcaatggcaaagagcttaaagttgagggccagatcacctactacaacagatacaagaggcagaatgtggttaaggatctgtctgtggaacttgacagactgtctgaggagtctgtgaacaatgacattagcagctggacaaagggaagatctggtgaagctctgtctctgttgaaaaagagattcagccacagacctgtgcaggaaaagtttgtgtgtctgaactgtggctttgagacacatgctgatgaacaagctgctctgaatattgccagatcttggctgttcctgagaagccaggagtacaagaagtaccaaaccaacaagaccacaggcaacacagacaaaagggcttttgtggaaacatggcagagcttctacaggaagaaactgaaagaagtttggaagcctgctgtgggatctcctgctgctaaaagagtgaagttggac

SEQ ID NO: 9376 - DNA, 3006 bp, synthetic construct
  source 1..3006: mol_type = other DNA
atggccccagctgccaagagagtgaaactggactcaagacaagagatcaagagaatcaacaagatcagaagaagactggtgaaggacagcaacaccaagaaggctggcaagacaggccccatgaagaccctgctggtgagagtgatgaccccagacctgagagagagactggaaaacctgagaaagaagccagagaatattcctcagcccatcagcaacacaagcagagccaacctgaacaagctgctgacagactacactgagatgaagaaggccatcctgcatgtgtactgggaggagtttcagaaggacccagtgggcctgatgagcagagtggctcagccagctagcaagaagatagatcagaacaagctgaaaccagaaatggatgagaaaggcaacctaaccactgcaggctttgcctgctctcagtgtgggcagcccctgtttgtgtacaagctggagcaagtgagtgagaagggtaaggcctacaccaactactttggcagatgcaatgtggcagagcatgagaagctgatcctgctggcccaactgaagccagaaaaagattctgatgaggcagtgacctacagtctgggcaagtttgggcagagagccctggacttctacagcatccatgtgaccaaggagagcacccaccctgtgaagcccctggctcagattgcaggcaacagatatgcttcaggccctgtgggcaaggccctgtctgatgcctgcatgggcaccatagctagcttcctgagcaagtaccaagacatcatcattgagcatcagaaggtggtgaagggcaatcagaaaagactggagagcctgagagagctggcaggcaaggagaacctggagtaccctagtgtgaccctgccccctcagccccacaccaaggagggggtggatgcctacaatgaggtgattgctagagtgagaatgtgggtgaacctgaacctgtggcagaagctgaagctgagcagagatgatgccaagcccctgctgagactgaagggcttccctagcttccccctggtggagagacaagccaatgaggtggactggtgggacatggtgtgcaatgtgaagaagcttatcaatgagaagaaggaggatggcaaggtgttctggcagaatctggcaggctataagagacaagaggccctgagaccctacctgagctctgaggaggacagaaagaagggcaagaagtttgctagatatcagctgggagacctgctgctgcacctggagaagaagcatggagaggactggggcaaggtgtatgatgaggcctgggagagaattgacaagaaggtggaaggcctgtctaagcacatcaagctggaggaggagagaagatcagaggatgctcagagcaaggctgcactcacagactggcttagagccaaggctagctttgtgatagagggcctgaaggaggcagacaaggatgagttctgcagatgtgagctgaagctgcagaagtggtatggggacctgagaggcaagccctttgccattgaggcagagaacagcatcctggacatcagtggcttcagcaagcagtacaactgtgccttcatctggcagaaggatggtgttaagaagctgaacctgtacctgatcatcaactacttcaaggggggcaagctgagattcaagaagatcaagccagaggcctttgaggccaacagattctacacagtgatcaacaagaagagtggtgagatagtgcccatggaggtgaacttcaactttgatgaccccaacctgatcatcctgcccctggcctttggcaagagacaaggcagagagttcatctggaatgacctgctgagcctggagacaggcagcctgaagctggccaatggcagagtgatagagaagaccctgtacaacagaagaacaagacaagatgagcctgccctgtttgtggccctgacctttgagagaagagaggtgctggatagcagcaacatcaagcccatgaacctgataggagtggacagaggtgaaaatatcccagctgtgattgcattaacagacccagagggctgccccctgagcagattcaaggacagcctgggcaaccccacccacatcctgagaattggggagagctacaaggagaagcagagaaccatccaagccaagaaagaggtggagcagagaagagctgggggctacagcagaaagtatgctagcaaggccaagaacctggcagatgatatggtgagaaacactgctagagacctgctgtactatgctgtgacccaagatgccatgctgatctttgagaacctgagcagaggctttggcagacaaggcaagagaaccttcatggctgagagacagtacacaagaatggaggactggctgacagccaagctggcctatgagggcctgcctagcaagacctatctctcaaaaaccctggctcagtacacaagcaagacatgcagcaactgtggctttaccatcacatcagctgactatgacagagtgctggagaagctgaagaagacagccacaggctggatgaccaccatcaatggcaaggagctgaaagtggaaggccaaataacctactacaacagatacaagagacagaatgtagtgaaggacctgagtgtggagctggacagactgtcagaggagtctgtgaacaatgacatcagcagctggaccaagggcagatcaggtgaggccctgagcctgctgaagaagagattcagccacagacctgtgcaagagaagtttgtgtgcctgaactgtggctttgagacacatgcagatgagcaagctgccctgaacattgctagaagctggctgttcctgagaagccaagagtacaagaagtatcagaccaacaagaccactggcaacacagacaagagagcctttgtggagacctggcagagcttctacagaaagaagctgaaagaggtgtggaagcctgcagtgggcagcccagcagcaaagagagtgaagctggac

SEQ ID NO: 9377 - DNA, 3006 bp, synthetic construct
  source 1..3006: mol_type = other DNA
atggcaccagctgctaagagagtaaaactggatagtaggcaggagattaagagaatcaataaaatcagaagaagactggtgaaggacagcaacaccaaaaaggctggcaagactgggccaatgaagactctgttggtcagggtcatgacccctgacctgagagaaagactggaaaatttgagaaaaaaaccagaaaatatccctcagccaatatctaatacatccagagcaaacctcaataagttgcttacagattatacagaaatgaagaaggccatcttgcatgtgtactgggaggaattccaaaaggacccagtggggctgatgagcagagtggcacaaccagctagtaagaaaattgaccagaataagcttaagccagaaatggatgagaaaggtaacttgacaacagcaggctttgcttgtagtcagtgtggccaacctctgtttgtgtacaagctggagcaggtgagtgaaaaaggaaaggcctacaccaattattttgggaggtgcaatgtggctgagcatgagaagctgatcctcttggcccagctgaaaccagagaaggactcagatgaggcagttacctattccttgggcaagtttggacagagagctctggatttttacagcattcatgtgaccaaggaaagcacccatcctgtgaagccactggcccagattgctggtaacagatatgcttcaggacctgttggtaaagccctgagtgatgcttgcatgggaaccattgcaagcttcctgtcaaagtaccaggacataatcatagagcatcaaaaggtggtgaaaggtaatcagaagaggttggagagcctgagagagctagcagggaaggagaatttggagtacccctctgtgaccctgcctccacaaccccacaccaaggaaggtgtggatgcctataatgaggtgattgctagagtgagaatgtgggtgaacctcaatctgtggcagaaattgaaactctctagagatgatgccaagcccctgcttagacttaagggatttccaagctttcccttggtagaaagacaggccaatgaggtggactggtgggatatggtgtgcaatgttaagaagttgattaatgagaaaaaggaagatgggaaagtgttttggcagaacctggcagggtataaaaggcaggaagctctgagaccttatctgagcagtgaggaagacaggaagaaaggcaagaagtttgctagatatcagttgggtgacctgctgctgcaccttgaaaaaaagcatggtgaggactgggggaaggtgtatgatgaagcttgggagaggattgacaagaaggttgagggcctgagcaagcacatcaaacttgaggaggagagaaggtctgaggatgcccaatcaaaagctgcccttacagactggctgagagcaaaggcaagctttgtcattgaaggactcaaggaggctgataaagatgaattctgcagatgtgaacttaagctccagaaatggtatggggacctcaggggcaaaccctttgccattgaggcagaaaattcaattttggacatcagtggttttagcaaacaatacaattgtgctttcatttggcaaaaggatggagttaagaagttgaacctgtacctgattatcaactattttaaaggtgggaaactgagatttaagaaaataaaaccagaggcatttgaggctaatagattttatactgtgatcaacaaaaaatcaggagagattgttcccatggaggtgaacttcaattttgatgatcccaatttgattatactgcccttggcctttgggaaaagacagggaagggaatttatctggaatgacttgctgagtttggaaactggctcccttaagcttgccaatggaagagtgattgagaagaccctgtataataggagaaccagacaggatgaaccagcactgtttgtagccttgacctttgagaggagagaagttctggactcctcaaacataaaacccatgaacctgataggggttgatagaggagagaacatcccagcagtgattgccttgacagatccagaagggtgtcctctgagtagatttaaggattctctgggaaaccctactcatatcctgagaataggtgaaagctacaaggagaagcagagaacaattcaggccaagaaggaggtagaacaaagaagggcagggggctattctagaaagtatgcttccaaagccaagaatctggcagatgacatggttagaaatactgcaagagacctgctgtattatgcagtcacacaagatgccatgctgatctttgaaaacctgtcaagaggttttgggagacaagggaagaggacatttatggctgaaagacagtacaccaggatggaagattggttgacagccaagcttgcatatgaaggtcttccttccaagacatacctgtctaagacacttgcccagtacacatccaagacttgttccaattgtggatttactattacctcagcagactatgacagagtgctggagaagctcaaaaaaacagctacagggtggatgactactatcaatggtaaagagctgaaggtggaggggcaaatcacatactataatagatataaaagacagaatgtagtgaaggatctgtcagttgaactggacaggctctctgaggaatctgttaataatgatatcagctcttggacaaaggggagatcaggtgaagccctcagtctgctcaaaaaaagattctcccacagacctgttcaggagaaatttgtctgccttaattgtggctttgagactcatgcagatgaacaggctgcacttaatatagccagaagctggctgttcctgaggtctcaggaatataagaagtatcagaccaacaaaaccacaggaaatacagacaagagagcatttgttgagacctggcagagtttctacagaaaaaagttgaaggaggtttggaaaccagcagtggggagtccagctgcaaaaagagtgaagctggac

SEQ ID NO: 9378 - DNA, 3006 bp, synthetic construct
  source 1..3006: mol_type = other DNA
atggccccagcagccaagagagtgaagctggacagcagacaggagatcaagaggatcaacaagatcagaagaaggctggtgaaggacagcaacaccaagaaggctggcaagacaggccccatgaagaccctgctggtgagagtgatgaccccagacctgagagagagactggagaacctgagaaagaagccagagaacatcccccagcccatcagcaacaccagcagagccaacctgaacaagctgctgacagactacacagagatgaagaaggccatcctgcatgtgtactgggaggagttccagaaggacccagtgggcctgatgagcagagtggcccagcctgccagcaagaagatagaccagaacaagctgaagcctgagatggatgagaagggcaacctgaccactgctggctttgcctgctctcagtgtggccagcctctgtttgtgtacaagctggagcaggtgagtgagaagggcaaggcctacaccaactactttggcagatgcaatgtggcagagcatgagaagctgatcctgctggcccagctgaagccagagaaggacagtgatgaggcagtgacctacagcctgggcaagtttggccagagagccctggacttctacagcatccatgtgaccaaggagagcacccaccctgtgaagcccctggcccagatagcaggcaacagatatgcctcaggacctgtgggcaaggccctgtcagatgcctgcatgggaaccattgccagcttcctgagcaagtaccaggacatcatcattgagcaccagaaggtggtgaagggcaaccagaagaggctggagagcctgagagagctggcaggcaaggagaacctggagtacccctctgtgaccctgccccctcagccccacaccaaggagggagtggatgcctacaatgaggtgatagccagagtgaggatgtgggtgaacctgaacctgtggcagaagctgaagctgagcagggatgatgccaagcccctgctgagactgaagggcttccccagcttccccctggtggagaggcaggccaatgaggtggactggtgggacatggtgtgcaatgtgaagaagctgatcaatgagaagaaggaggatggcaaggtgttctggcagaacctggcaggctacaagaggcaggaggccctgaggccctacctgagctcagaggaggacaggaagaagggcaagaagtttgccagataccagctgggagacctgctgctgcacctggagaagaagcatggtgaggactggggcaaggtgtatgatgaggcctgggagagaatagacaagaaggtggagggcctgagcaagcacatcaagctggaggaggagagaagatctgaggatgcccagagcaaggcagccctgacagactggctgagagccaaggccagctttgtgatagagggcctgaaggaggcagacaaggatgagttctgcagatgtgagctgaagctgcagaagtggtatggggacctgaggggcaagccctttgccatagaggcagagaacagcatcctggacatcagtggcttcagcaagcagtacaactgtgccttcatctggcagaaggatggtgtgaagaagctgaacctgtacctgatcatcaactacttcaaggggggcaagctgaggttcaagaagatcaagccagaggcctttgaggccaacaggttctacacagtgatcaacaagaagagtggtgagatagtgcccatggaggtgaacttcaactttgatgaccccaacctgatcatcctgcccctggcctttggcaagagacagggcagagagttcatctggaatgacctgctgagcctggagacaggcagcctgaagctggccaatggcagagtgattgagaagaccctgtacaacagaaggaccagacaggatgagccagccctgtttgtggccctgacctttgagagaagggaggtgctggacagcagcaacatcaagcccatgaacctgataggggtggacagaggtgagaacatccctgcagtgatagccctgactgaccctgagggctgtcccctgagcagattcaaggacagcctgggcaaccccacccacatcctgagaataggggagagctacaaggagaagcagagaaccatccaggccaagaaggaggtggagcagaggagagcagggggctacagcaggaagtatgccagcaaggccaagaacctggctgatgacatggtgagaaacactgccagggacctgctgtactatgcagtgacccaggatgccatgctgatctttgagaacctgagcagaggctttggcagacagggcaagaggaccttcatggcagagagacagtacaccaggatggaggactggctgacagccaagctggcctatgagggcctgcccagcaagacctacctgagcaagaccctggcccagtacaccagcaagacctgcagcaactgtggcttcaccatcacctctgcagactatgacagagtgctggagaagctgaagaagacagccacaggctggatgaccaccatcaatggcaaggagctgaaggtggagggccagatcacctactacaacagatacaagaggcagaatgtggtgaaggacctgtcagtggagctggacagactgtcagaggagtcagtgaacaatgacatcagcagctggaccaagggcagaagtggggaggccctgagcctgctgaagaagagattcagccacagaccagtgcaggagaagtttgtgtgcctgaactgtggctttgagacccatgcagatgagcaggcagctctgaacattgccagaagctggctgttcctgagaagccaggagtacaagaagtaccagaccaacaagaccactggcaacacagacaagagggcctttgtggagacctggcagagcttctacagaaagaagctgaaggaggtgtggaagcctgctgtgggcagcccagcagctaaaagggtgaagctggac

SEQ ID NO: 9379 - DNA, 3006 bp, synthetic construct
  source 1..3006: mol_type = other DNA
atggccccagctgccaagagagtgaagctggacagcagacaggagatcaagaggatcaacaagatcagaagaaggctggtgaaggacagcaacaccaagaaggctggcaagacaggccccatgaagaccctgctggtgagagtgatgaccccagacctgagagagagactggagaacctgagaaagaagcctgagaacatcccccagcccatcagcaacaccagcagagccaacctgaacaagctgctgacagactacactgagatgaagaaggccatcctgcatgtgtactgggaggagttccagaaggaccctgtgggcctgatgagcagagtggcccagcctgccagcaagaagattgaccagaacaagctgaagcctgagatggatgagaagggcaacctgaccacagctggctttgcctgcagccagtgtggccagcccctgtttgtgtacaagctggagcaggtgagtgagaagggcaaggcctacaccaactactttggcagatgcaatgtggcagagcatgagaagctgatcctgctggcccagctgaagccagaaaaggacagtgatgaggctgtgacctacagcctgggcaagtttggccagagagccctggacttctacagcatccatgtgaccaaggagagcacccacccagtgaagcccctggcccagattgcaggcaacagatatgcctctggccctgtgggcaaggccctgtcagatgcctgcatgggcaccatagccagcttcctgagcaagtaccaggacatcatcatagagcaccagaaggtggtgaagggcaaccagaagaggctggagagcctgagagagctggcaggcaaggagaacctggagtacccctcagtgaccctgcccccccagccccacaccaaggagggggtggatgcctacaatgaggtgatagccagagtgaggatgtgggtgaacctgaacctgtggcagaagctgaagctgagcagggatgatgccaagcccctgctgagactgaagggcttccccagcttccccctggtggagaggcaggccaatgaggtggactggtgggacatggtgtgcaatgtgaagaagctgatcaatgagaagaaggaggatggcaaggtgttctggcagaacctggctggctacaagaggcaggaggccctgaggccctacctgagcagtgaggaggacaggaagaagggcaagaagtttgccagataccagctgggggacctgctgctgcacctggagaagaagcatggagaggactggggcaaggtgtatgatgaggcctgggagagaattgacaagaaggtggagggcctgagcaagcacatcaagctggaggaggagagaagaagtgaggatgcccagagcaaggctgccctgacagactggctgagagccaaggccagctttgtgatagagggcctgaaggaggcagacaaggatgagttctgcagatgtgagctgaagctgcagaagtggtatggagacctgaggggcaagccctttgccatagaggcagagaacagcatcctggacatcagtggcttcagcaagcagtacaactgtgccttcatctggcagaaggatggggtgaagaagctgaacctgtacctgatcatcaactacttcaagggaggcaagctgaggttcaagaagatcaagccagaggcctttgaggccaacaggttctacacagtgatcaacaagaagtctggggagattgtgcccatggaggtgaacttcaactttgatgaccccaacctgatcatcctgcccctggcctttggcaagagacagggcagagagttcatctggaatgacctgctgagcctggagacaggcagcctgaagctggccaatggcagagtgatagagaagaccctgtacaacagaaggaccagacaggatgagccagccctgtttgtggccctgacctttgagagaagggaggtgctggacagcagcaacatcaagcccatgaacctgataggagtggacagaggggagaacatcccagcagtgattgccctgactgaccctgagggctgccccctgagcagattcaaggacagcctgggcaaccccacccacatcctgagaataggagagagctacaaggagaagcagagaaccatccaggccaagaaggaggtggagcagaggagagcaggaggctacagcaggaagtatgccagcaaggccaagaacctggcagatgacatggtgagaaacactgccagggacctgctgtactatgcagtgacccaggatgccatgctgatctttgagaacctgagcagaggctttggcagacagggcaagaggaccttcatggctgagagacagtacaccaggatggaggactggctgacagccaagctggcctatgagggcctgcccagcaagacctacctgagcaagaccctggcccagtacaccagcaagacctgcagcaactgtggcttcaccatcaccagtgcagactatgacagagtgctggagaagctgaagaagacagccacaggctggatgaccaccatcaatggcaaggagctgaaggtggagggccagatcacctactacaacagatacaagaggcagaatgtggtgaaggacctgtctgtggagctggacagactgagtgaggagagtgtgaacaatgacatcagcagctggaccaagggcagatcaggagaggccctgagcctgctgaagaagagattcagccacagacctgtgcaggagaagtttgtgtgcctgaactgtggctttgagacccatgcagatgagcaggcagccctgaacatagccagaagctggctgttcctgagaagccaggagtacaagaagtaccagaccaacaagaccacaggcaacactgacaagagggcctttgtggagacctggcagagcttctacagaaagaagctgaaggaggtgtggaagccagctgtgggcagccctgcagccaaaagggtgaagctggac

SEQ ID NO: 9380 - DNA, 3006 bp, synthetic construct
  source 1..3006: mol_type = other DNA
atggccccagctgccaagagagtgaagctggacagcagacaggagatcaagaggatcaacaagatcagaagaaggctggtgaaggacagcaacaccaagaaggctggcaagacaggccccatgaagaccctgctggtgagagtgatgacccctgacctgagagagagactggagaacctgagaaagaagcctgagaacatcccccagcccatcagcaacaccagcagagccaacctgaacaagctgctgacagactacactgagatgaagaaggccatcctgcatgtgtactgggaggagttccagaaggaccctgtgggcctgatgagcagagtggcccagccagccagcaagaagatagaccagaacaagctgaagcctgagatggatgagaagggcaacctgaccactgctggctttgcctgcagccagtgtggccagcccctgtttgtgtacaagctggagcaggtgagtgagaagggcaaggcctacaccaactactttggcagatgcaatgtggctgagcatgagaagctgatcctgctggcccagctgaagcctgagaaggactcagatgaggcagtgacctacagcctgggcaagtttggccagagagccctggacttctacagcatccatgtgaccaaggagagcacccaccctgtgaagcccctggcccagattgcaggcaacagatatgcctcaggccctgtgggcaaagccctgtcagatgcctgcatgggcaccatagccagcttcctgagcaagtaccaggacatcatcatagagcaccagaaggtggtgaagggcaaccagaagaggctggagagcctgagagagctggcaggcaaggagaacctggagtaccccagtgtgaccctgcccccccagccccacaccaaggagggggtggatgcctacaatgaggtgatagccagagtgaggatgtgggtgaacctgaacctgtggcagaagctgaagctgagcagggatgatgccaagcccctgctgagactgaagggcttccccagcttccccctggtggagaggcaggccaatgaggtggactggtgggacatggtgtgcaatgtgaagaagctgatcaatgagaagaaggaggatggcaaggtgttctggcagaacctggcaggctacaagaggcaggaggccctgaggccctacctgagcagtgaggaggacaggaagaagggcaagaagtttgccagataccagctgggtgacctgctgctgcacctggagaagaagcatggagaggactggggcaaggtgtatgatgaggcctgggagagaattgacaagaaggtggagggcctgagcaagcacatcaagctggaggaggagagaagatcagaggatgcccagagcaaggcagccctgacagactggctgagagccaaggccagctttgtgattgagggcctgaaggaggctgacaaggatgagttctgcagatgtgagctgaagctgcagaagtggtatggagacctgaggggcaagccctttgccattgaggcagagaacagcatcctggacatcagtggcttcagcaagcagtacaactgtgccttcatctggcagaaggatggagtgaagaagctgaacctgtacctgatcatcaactacttcaaggggggcaagctgaggttcaagaagatcaagccagaggcctttgaggccaacaggttctacactgtgatcaacaagaagtctggggagatagtgcccatggaggtgaacttcaactttgatgaccccaacctgatcatcctgcccctggcctttggcaagagacagggcagagagttcatctggaatgacctgctgagcctggagacaggcagcctgaagctggccaatggcagagtgatagagaagaccctgtacaacagaaggaccagacaggatgagccagccctgtttgtggccctgacctttgagagaagggaggtgctggacagcagcaacatcaagcccatgaacctgattggtgtggacagaggggagaacatcccagctgtgattgccctgacagacccagagggctgccccctgagcagattcaaggacagcctgggcaaccccacccacatcctgagaattggagagagctacaaggagaagcagagaaccatccaggccaagaaggaggtggagcagaggagagcaggtggctacagcaggaagtatgccagcaaggccaagaacctggctgatgacatggtgagaaacactgccagggacctgctgtactatgcagtgacccaggatgccatgctgatctttgagaacctgagcagaggctttggcagacagggcaagaggaccttcatggctgagagacagtacaccaggatggaggactggctgacagccaagctggcctatgagggcctgcccagcaagacctacctgagcaagaccctggcccagtacaccagcaagacctgcagcaactgtggcttcaccatcaccagtgcagactatgacagagtgctggagaagctgaagaagactgccactggctggatgaccaccatcaatggcaaggagctgaaggtggagggccagatcacctactacaacagatacaagaggcagaatgtggtgaaggacctgtcagtggagctggacagactgtctgaggagtctgtgaacaatgacatcagcagctggaccaagggcagaagtggtgaggccctgagcctgctgaagaagagattcagccacagaccagtgcaggagaagtttgtgtgcctgaactgtggctttgagacccatgcagatgagcaggctgccctgaacatagccagaagctggctgttcctgagaagccaggagtacaagaagtaccagaccaacaagaccactggcaacacagacaagagggcctttgtggagacctggcagagcttctacagaaagaagctgaaggaggtgtggaagccagcagtgggcagccctgctgctaagagggtgaagctggac

SEQ ID NO: 9381 - DNA, 3006 bp, synthetic construct
  source 1..3006: mol_type = other DNA
atggccccagcggccaaacgggtgaagctggactctagacaagagatcaagagaatcaacaagatcagaaggagactggtcaaggacagcaacacaaagaaggccggcaagacaggccccatgaaaaccctgctcgtcagagtgatgacccctgacctgagagagcggctggaaaacctgagaaagaagcccgagaacatccctcagcctatcagcaacaccagcagggccaacctgaacaagctgctgaccgactacaccgagatgaagaaagccatcctgcacgtgtactgggaagagttccagaaagaccccgtgggcctgatgagcagagttgctcagcctgccagcaagaagatcgaccagaacaagctgaagcccgagatggacgagaagggcaatctgaccacagccggctttgcctgctctcagtgtggccagcctctgttcgtgtacaagctggaacaggtgtccgagaaaggcaaggcctacaccaactacttcggcagatgtaacgtggccgagcacgagaagctgattctgctggcccagctgaaacctgagaaggactctgatgaggccgtgacctacagcctgggcaagtttggacagagagccctggacttctacagcatccacgtgaccaaagaaagcacacaccccgtgaagcccctggctcagatcgccggcaatagatacgcctctggacctgtgggcaaagccctgtccgatgcctgcatgggaacaatcgccagcttcctgagcaagtaccaggacatcatcatcgagcaccagaaggtggtcaagggcaaccagaagagactggaaagcctgagggagctggccggcaaagagaacctggaataccccagcgtgaccctgcctcctcagcctcacacaaaagaaggcgtggacgcctacaacgaagtgatcgccagagtgagaatgtgggtcaacctgaacctgtggcagaagctgaaactgtccagggacgacgccaagcctctgctgagactgaagggcttccctagcttccctctggtggaaagacaggccaatgaagtggattggtgggacatggtctgcaacgtgaagaagctgatcaacgagaagaaagaggatggcaaggttttctggcagaacctggccggctacaagagacaagaagccctgaggccttacctgagcagcgaagaggaccggaagaagggcaagaagttcgccagataccagctgggcgacctgctgctgcacctggaaaagaagcacggcgaggactggggcaaagtgtacgatgaggcctgggagagaatcgacaagaaggtggaaggcctgagcaagcacattaagctggaagaggaaagaaggagcgaggacgcccaatctaaagccgctctgaccgattggctgagagccaaggccagctttgtgatcgagggcctgaaagaggccgacaaggacgagttctgcagatgcgagctgaagctgcagaagtggtacggcgatctgagaggcaagcccttcgccattgaggccgagaacagcatcctggacatcagcggcttcagcaagcagtacaactgcgccttcatttggcagaaagacggcgtcaagaaactgaacctgtacctgatcatcaattacttcaaaggcggcaagctgcggttcaagaagatcaaacccgaggccttcgaggctaacagattctacaccgtgatcaacaaaaagtccggcgagatcgtgcccatggaagtgaacttcaacttcgacgaccccaacctgattatcctgcctctggccttcggcaagagacagggcagagagttcatctggaacgatctgctgagcctggaaaccggctctctgaagctggccaatggcagagtgatcgagaaaaccctgtacaacaggagaaccagacaggacgagcctgctctgtttgtggccctgaccttcgagagaagagaggtgctggacagcagcaacatcaagcccatgaacctgatcggcgtggaccggggcgagaatatccctgctgtgatcgccctgacagaccctgaaggatgcccactgagcagattcaaggactccctgggcaaccctacacacatcctgagaatcggcgagagctacaaagagaagcagaggacaatccaggccaagaaagaggtggaacagagaagagccggcggatactctaggaagtacgccagcaaggccaagaatctggccgacgacatggtccgaaacaccgccagagatctgctgtactacgccgtgacacaggacgccatgctgatcttcgagaatctgagcagaggcttcggccggcagggcaagagaacctttatggccgagaggcagtacaccagaatggaagattggctcacagctaaactggcctacgagggactgcccagcaagacctacctgtccaaaacactggcccagtatacctccaagacctgcagcaattgcggcttcaccatcaccagcgccgactacgacagagtgctggaaaagctcaagaaaaccgccaccggctggatgaccaccatcaacggcaaagagctgaaggttgagggccagatcacctactacaacaggtacaagaggcagaacgtcgtgaaggatctgagcgtggaactggacagactgagcgaagagagcgtgaacaacgacatcagcagctggacaaagggcagatcaggcgaggctctgagcctgctgaagaagaggtttagccacagacctgtgcaagagaagttcgtgtgcctgaactgcggcttcgagacacacgccgatgaacaggctgccctgaacattgccagaagctggctgttcctgagaagccaagagtacaagaagtaccagaccaacaagaccaccggcaacaccgacaagagggcctttgtggaaacctggcagagcttctacagaaaaaagctgaaagaagtctggaagcccgccgtgggatccccagccgcgaagcgagtgaaactggac

SEQ ID NO: 9382 - protein, 978 aa, synthetic construct
QEGKRINKIRRRLVKDSNTKKAGKTGPMKTLLVRVMTPDLRERLENLRKKPENIPQPISNTSQANLNKLLTDYTEMKKAILHVYWEEFQKDPVGLMSRVAQPASKKIDQNKLKPEMDEKGNLTTAGFACSQCGQPLFVYKLEQVSEKGKAYTNYFGRCNVAEHEKLILLAQLKPEKDSDEAVTYSLGKFGQRALDFYSIHVTKESTHPVKPLAQIAGNRYASGPVGKALSDACMGTIASFLSKYQDIIIEHQKVVKGNQKRLESLRELAGKENLEYPSVTLPPQPHTKEGVDAYNEVIARVRMWVNLNLWQKLKLSRDDAKPLLRLKGFPSFPLVERQANEVDWWDMVCNVKKLINEKKEDGKVFWQNLAGYKRQEALRPYLSSEEDRKKGKKFARYQLGDLLLHLEKKHGEDWGKVYDEAWERIDKKVEGLSKHIKLEEERRSEDAQSKAALTDWLRAKASFVIEGLKEADKDEFCRCELKLQKWYGDLRGKPFAIEAENSILDISGFSKQYNCAFIWQKDGVKKLNLYLIINYFKGGKLRFKKIKPEAFEANRFYTVINKKSGEIVPMEVNFNFDDPNLIILPLAFGKRQGREFIWNDLLSLETGSLKLANGRVIEKTLYNRRTRQDEPALFVALTFERREVLDSSNIKPMNLIGVDRGENIPAVIALTDPEGCPLSRFKDSLGNPTHILRIGESYKEKQRTIQAKKEVEQRRAGGYSRKYASKAKNLADDMVRNTARDLLYYAVTQDAMLIFENLSRGFGRQGKRTFMAERQYTRMEDWLTAKLAYEGLPSKTYLSKTLAQYTSKTCSNCGFTITSADYDRVLEKLKKTATGWMTTINGKELKVEGQITYYNRYKRQNVVKDLSVELDRLSEESVNNDISSWTKGRSGEALSLLKKRFSHRPVQEKFVCLNCGFETHADEQAALNIARSWLFLRSQEYKKYQTNKTTGNTDKRAFVETWQSFYRKKLKEVWKPAV

SEQ ID NO: 9383 - protein, 978 aa, synthetic construct
QEGKRINKIRRRLVKDSNTKKAGKTGPMKTLLVRVMTPDLRERLENLRKKPENIPQPISNTSRANLNKLLTDYTEMKKAILHVYWEEFQKDPVGLMSRVAQPASKKIDQNKLKPEMDEKGNLTTAGFACSQCGQPLFVYKLEQVSEKGKAYTNYFGRCNVAEHEKLIKLAQLKPEKDSDEAVTYSLGKFGQRALDFYSIHVTKESTHPVKPLAQIAGNRYASGPVGKALSDACMGTIASFLSKYQDIIIEHQKVVKGNQKRLESLRELAGKENLEYPSVTLPPQPHTKEGVDAYNEVIARVRMWVNLNLWQKLKLSRDDAKPLLRLKGFPSFPLVERQANEVDWWDMVCNVKKLINEKKEDGKVFWQNLAGYKRQEALRPYLSSEEDRKKGKKFARYQLGDLLLHLEKKHGEDWGKVYDEAWERIDKKVEGLSKHIKLEEERRSEDAQSKAALTDWLRAKASFVIEGLKEADKDEFCRCELKLQKWYGDLRGKPFAIEAENSILDISGFSKQYNCAFIWQKDGVKKLNLYLIINYFKGGKLRFKKIKPEAFEANRFYTVINKKSGEIVPMEVNFNFDDPNLIILPLAFGKRQGREFIWNDLLSLETGSLKLANGRVIEKTLYNRRTRQDEPALFVALTFERREVLDSSNIKPMNLIGVDRGENIPAVIALTDPEGCPLSRFKDSLGNPTHILRIGESYKEKQRTIQAKKEVEQRRAGGYSRKYASKAKNLADDMVRNTARDLLYYAVTQDAMLIFENLSRGFGRQGKRTFMAERQYTRMEDWLTAKLAYEGLPSKTYLSKTLAQYTSKTCSNCGFTITSADYDRVLEKLKKTATGWMTTINGKELKVEGQITYYNRYKRQNVVKDLSVELDRLSEESVNNDISSWTKGRSGEALSLLKKRFSHRPVQEKFVCLNCGFETHADEQAALNIARSWLFLRSQEYKKYQTNKTTGNTDKRAFVETWQSFYRKKLKEVWKPAV

SEQ ID NO: 9384 - protein, 978 aa, synthetic construct
QEGKRINKIRRRLVKDSNTKKAGKTGPMKTLLVRVMTPDLRERLENLRKKPENIPQPISNTSRANLNKLLTDYTEMKKAILHVYWEEFQKDPVGLMSRVAQPASKKIDQNKLKPEMDEKGNLTTAGFACSQCGQPLFVYKLEQVSEKGKAYTNYFGRCNVAEHEKLIQLAQLKPEKDSDEAVTYSLGKFGQRALDFYSIHVTKESTHPVKPLAQIAGNRYASGPVGKALSDACMGTIASFLSKYQDIIIEHQKVVKGNQKRLESLRELAGKENLEYPSVTLPPQPHTKEGVDAYNEVIARVRMWVNLNLWQKLKLSRDDAKPLLRLKGFPSFPLVERQANEVDWWDMVCNVKKLINEKKEDGKVFWQNLAGYKRQEALRPYLSSEEDRKKGKKFARYQLGDLLLHLEKKHGEDWGKVYDEAWERIDKKVEGLSKHIKLEEERRSEDAQSKAALTDWLRAKASFVIEGLKEADKDEFCRCELKLQKWYGDLRGKPFAIEAENSILDISGFSKQYNCAFIWQKDGVKKLNLYLIINYFKGGKLRFKKIKPEAFEANRFYTVINKKSGEIVPMEVNFNFDDPNLIILPLAFGKRQGREFIWNDLLSLETGSLKLANGRVIEKTLYNRRTRQDEPALFVALTFERREVLDSSNIKPMNLIGVDRGENIPAVIALTDPEGCPLSRFKDSLGNPTHILRIGESYKEKQRTIQAKKEVEQRRAGGYSRKYASKAKNLADDMVRNTARDLLYYAVTQDAMLIFENLSRGFGRQGKRTFMAERQYTRMEDWLTAKLAYEGLPSKTYLSKTLAQYTSKTCSNCGFTITSADYDRVLEKLKKTATGWMTTINGKELKVEGQITYYNRYKRQNVVKDLSVELDRLSEESVNNDISSWTKGRSGEALSLLKKRFSHRPVQEKFVCLNCGFETHADEQAALNIARSWLFLRSQEYKKYQTNKTTGNTDKRAFVETWQSFYRKKLKEVWKPAV

SEQ ID NO: 9385 - protein, 978 aa, synthetic construct
QEGKRINKIRRRLVKDSNTKKAGKTGPMKTLLVRVMTPDLRERLENLRKKPENIPQPISNTSRANLNKLLTDYTEMKKAILHVYWEEFQKDPVGLMSRVAQPASKKIDQNKLKPEMDEKGNLTTAGFACSQCGQPLFVYKLEQVSEKGKAYTNYFGRCNVAEHEKLILLDQLKPEKDSDEAVTYSLGKFGQRALDFYSIHVTKESTHPVKPLAQIAGNRYASGPVGKALSDACMGTIASFLSKYQDIIIEHQKVVKGNQKRLESLRELAGKENLEYPSVTLPPQPHTKEGVDAYNEVIARVRMWVNLNLWQKLKLSRDDAKPLLRLKGFPSFPLVERQANEVDWWDMVCNVKKLINEKKEDGKVFWQNLAGYKRQEALRPYLSSEEDRKKGKKFARYQLGDLLLHLEKKHGEDWGKVYDEAWERIDKKVEGLSKHIKLEEERRSEDAQSKAALTDWLRAKASFVIEGLKEADKDEFCRCELKLQKWYGDLRGKPFAIEAENSILDISGFSKQYNCAFIWQKDGVKKLNLYLIINYFKGGKLRFKKIKPEAFEANRFYTVINKKSGEIVPMEVNFNFDDPNLIILPLAFGKRQGREFIWNDLLSLETGSLKLANGRVIEKTLYNRRTRQDEPALFVALTFERREVLDSSNIKPMNLIGVDRGENIPAVIALTDPEGCPLSRFKDSLGNPTHILRIGESYKEKQRTIQAKKEVEQRRAGGYSRKYASKAKNLADDMVRNTARDLLYYAVTQDAMLIFENLSRGFGRQGKRTFMAERQYTRMEDWLTAKLAYEGLPSKTYLSKTLAQYTSKTCSNCGFTITSADYDRVLEKLKKTATGWMTTINGKELKVEGQITYYNRYKRQNVVKDLSVELDRLSEESVNNDISSWTKGRSGEALSLLKKRFSHRPVQEKFVCLNCGFETHADEQAALNIARSWLFLRSQEYKKYQTNKTTGNTDKRAFVETWQSFYRKKLKEVWKPAV

SEQ ID NO: 9386 - protein, 978 aa, synthetic construct
QEGKRINKIRRRLVKDSNTKKAGKTGPMKTLLVRVMTPDLRERLENLRKKPENIPQPISNTSRANLNKLLTDYTEMKKAILHVYWEEFQKDPVGLMSRVAQPASKKIDQNKLKPEMDEKGNLTTAGFACSQCGQPLFVYKLEQVSEKGKAYTNYFGRCNVAEHEKLILLYQLKPEKDSDEAVTYSLGKFGQRALDFYSIHVTKESTHPVKPLAQIAGNRYASGPVGKALSDACMGTIASFLSKYQDIIIEHQKVVKGNQKRLESLRELAGKENLEYPSVTLPPQPHTKEGVDAYNEVIARVRMWVNLNLWQKLKLSRDDAKPLLRLKGFPSFPLVERQANEVDWWDMVCNVKKLINEKKEDGKVFWQNLAGYKRQEALRPYLSSEEDRKKGKKFARYQLGDLLLHLEKKHGEDWGKVYDEAWERIDKKVEGLSKHIKLEEERRSEDAQSKAALTDWLRAKASFVIEGLKEADKDEFCRCELKLQKWYGDLRGKPFAIEAENSILDISGFSKQYNCAFIWQKDGVKKLNLYLIINYFKGGKLRFKKIKPEAFEANRFYTVINKKSGEIVPMEVNFNFDDPNLIILPLAFGKRQGREFIWNDLLSLETGSLKLANGRVIEKTLYNRRTRQDEPALFVALTFERREVLDSSNIKPMNLIGVDRGENIPAVIALTDPEGCPLSRFKDSLGNPTHILRIGESYKEKQRTIQAKKEVEQRRAGGYSRKYASKAKNLADDMVRNTARDLLYYAVTQDAMLIFENLSRGFGRQGKRTFMAERQYTRMEDWLTAKLAYEGLPSKTYLSKTLAQYTSKTCSNCGFTITSADYDRVLEKLKKTATGWMTTINGKELKVEGQITYYNRYKRQNVVKDLSVELDRLSEESVNNDISSWTKGRSGEALSLLKKRFSHRPVQEKFVCLNCGFETHADEQAALNIARSWLFLRSQEYKKYQTNKTTGNTDKRAFVETWQSFYRKKLKEVWKPAV

SEQ ID NO: 9387 - protein, 978 aa, synthetic construct
QEGKRINKIRRRLVKDSNTKKAGKTGPMKTLLVRVMTPDLRERLENLRKKPENIPQPISNTSRANLNKLLTDYTEMKKAILHVYWEEFQKDPVGLMSRVAQPASKKIDQNKLKPEMDEKGNLTTAGFACSQCGQPLFVYKLEQVSEKGKAYTNYFGRCNVAEHEKLILLSQLKPEKDSDEAVTYSLGKFGQRALDFYSIHVTKESTHPVKPLAQIAGNRYASGPVGKALSDACMGTIASFLSKYQDIIIEHQKVVKGNQKRLESLRELAGKENLEYPSVTLPPQPHTKEGVDAYNEVIARVRMWVNLNLWQKLKLSRDDAKPLLRLKGFPSFPLVERQANEVDWWDMVCNVKKLINEKKEDGKVFWQNLAGYKRQEALRPYLSSEEDRKKGKKFARYQLGDLLLHLEKKHGEDWGKVYDEAWERIDKKVEGLSKHIKLEEERRSEDAQSKAALTDWLRAKASFVIEGLKEADKDEFCRCELKLQKWYGDLRGKPFAIEAENSILDISGFSKQYNCAFIWQKDGVKKLNLYLIINYFKGGKLRFKKIKPEAFEANRFYTVINKKSGEIVPMEVNFNFDDPNLIILPLAFGKRQGREFIWNDLLSLETGSLKLANGRVIEKTLYNRRTRQDEPALFVALTFERREVLDSSNIKPMNLIGVDRGENIPAVIALTDPEGCPLSRFKDSLGNPTHILRIGESYKEKQRTIQAKKEVEQRRAGGYSRKYASKAKNLADDMVRNTARDLLYYAVTQDAMLIFENLSRGFGRQGKRTFMAERQYTRMEDWLTAKLAYEGLPSKTYLSKTLAQYTSKTCSNCGFTITSADYDRVLEKLKKTATGWMTTINGKELKVEGQITYYNRYKRQNVVKDLSVELDRLSEESVNNDISSWTKGRSGEALSLLKKRFSHRPVQEKFVCLNCGFETHADEQAALNIARSWLFLRSQEYKKYQTNKTTGNTDKRAFVETWQSFYRKKLKEVWKPAV

SEQ ID NO: 9388 - protein, 978 aa, synthetic construct
QEGKRINKIRRRLVKDSNTKKAGKTGPMKTLLVRVMTPDLRERLENLRKKPENIPQPISNTSRANLNKLLTDYTEMKKAILHVYWEEFQKDPVGLMSRVAQPASKKIDQNKLKPEMDEKGNLTTAGFACSQCGQPLFVYKLEQVSEKGKAYTNYFGRCNVAEHEKLILLAQLKPEKDSDEAVTYSLGKFGQRALDFYSIHVTKESTHPVKPLAQIAGNRYASTPVGKALSDACMGTIASFLSKYQDIIIEHQKVVKGNQKRLESLRELAGKENLEYPSVTLPPQPHTKEGVDAYNEVIARVRMWVNLNLWQKLKLSRDDAKPLLRLKGFPSFPLVERQANEVDWWDMVCNVKKLINEKKEDGKVFWQNLAGYKRQEALRPYLSSEEDRKKGKKFARYQLGDLLLHLEKKHGEDWGKVYDEAWERIDKKVEGLSKHIKLEEERRSEDAQSKAALTDWLRAKASFVIEGLKEADKDEFCRCELKLQKWYGDLRGKPFAIEAENSILDISGFSKQYNCAFIWQKDGVKKLNLYLIINYFKGGKLRFKKIKPEAFEANRFYTVINKKSGEIVPMEVNFNFDDPNLIILPLAFGKRQGREFIWNDLLSLETGSLKLANGRVIEKTLYNRRTRQDEPALFVALTFERREVLDSSNIKPMNLIGVDRGENIPAVIALTDPEGCPLSRFKDSLGNPTHILRIGESYKEKQRTIQAKKEVEQRRAGGYSRKYASKAKNLADDMVRNTARDLLYYAVTQDAMLIFENLSRGFGRQGKRTFMAERQYTRMEDWLTAKLAYEGLPSKTYLSKTLAQYTSKTCSNCGFTITSADYDRVLEKLKKTATGWMTTINGKELKVEGQITYYNRYKRQNVVKDLSVELDRLSEESVNNDISSWTKGRSGEALSLLKKRFSHRPVQEKFVCLNCGFETHADEQAALNIARSWLFLRSQEYKKYQTNKTTGNTDKRAFVETWQSFYRKKLKEVWKPAV

SEQ ID NO: 9389 - protein, 978 aa, synthetic construct
QEGKRINKIRRRLVKDSNTKKAGKTGPMKTLLVRVMTPDLRERLENLRKKPENIPQPISNTSRANLNKLLTDYTEMKKAILHVYWEEFQKDPVGLMSRVAQPASKKIDQNKLKPEMDEKGNLTTAGFACSQCGQPLFVYKLEQVSEKGKAYTNYFGRCNVAEHEKLILLAQLKPEKDSDEAVTYSLGKFGQRALDFYSIHVTKESTHPVKPLAQIAGNRYASGPVGKALSDACMGTIASFLSKYQDIIIEHQKVVKGNQKRLESLRELAGKENLEYPSVTLPPQPHTKEGVDAYNEVIARVRTWVNLNLWQKLKLSRDDAKPLLRLKGFPSFPLVERQANEVDWWDMVCNVKKLINEKKEDGKVFWQNLAGYKRQEALRPYLSSEEDRKKGKKFARYQLGDLLLHLEKKHGEDWGKVYDEAWERIDKKVEGLSKHIKLEEERRSEDAQSKAALTDWLRAKASFVIEGLKEADKDEFCRCELKLQKWYGDLRGKPFAIEAENSILDISGFSKQYNCAFIWQKDGVKKLNLYLIINYFKGGKLRFKKIKPEAFEANRFYTVINKKSGEIVPMEVNFNFDDPNLIILPLAFGKRQGREFIWNDLLSLETGSLKLANGRVIEKTLYNRRTRQDEPALFVALTFERREVLDSSNIKPMNLIGVDRGENIPAVIALTDPEGCPLSRFKDSLGNPTHILRIGESYKEKQRTIQAKKEVEQRRAGGYSRKYASKAKNLADDMVRNTARDLLYYAVTQDAMLIFENLSRGFGRQGKRTFMAERQYTRMEDWLTAKLAYEGLPSKTYLSKTLAQYTSKTCSNCGFTITSADYDRVLEKLKKTATGWMTTINGKELKVEGQITYYNRYKRQNVVKDLSVELDRLSEESVNNDISSWTKGRSGEALSLLKKRFSHRPVQEKFVCLNCGFETHADEQAALNIARSWLFLRSQEYKKYQTNKTTGNTDKRAFVETWQSFYRKKLKEVWKPAV

SEQ ID NO: 9390 - protein, 978 aa, synthetic construct
QEGKRINKIRRRLVKDSNTKKAGKTGPMKTLLVRVMTPDLRERLENLRKKPENIPQPISNTSRANLNKLLTDYTEMKKAILHVYWEEFQKDPVGLMSRVAQPASKKIDQNKLKPEMDEKGNLTTAGFACSQCGQPLFVYKLEQVSEKGKAYTNYFGRCNVAEHEKLILLAQLKPEKDSDEAVTYSLGKFGQRALDFYSIHVTKESTHPVKPLAQIAGNRYASGPVGKALSDACMGTIASFLSKYQDIIIEHQKVVKGNQKRLESLRELAGKENLEYPSVTLPPQPHTKEGVDAYNEVIARVRMWVNLNLWQKLKLSRDDAKPLLRLKGFPSFPLVERQANEVDWWDMVCNVKKLINEKKEDGKVFWQNLAGYKRQEALRPYLSSEEDRKKGKKFARTQLGDLLLHLEKKHGEDWGKVYDEAWERIDKKVEGLSKHIKLEEERRSEDAQSKAALTDWLRAKASFVIEGLKEADKDEFCRCELKLQKWYGDLRGKPFAIEAENSILDISGFSKQYNCAFIWQKDGVKKLNLYLIINYFKGGKLRFKKIKPEAFEANRFYTVINKKSGEIVPMEVNFNFDDPNLIILPLAFGKRQGREFIWNDLLSLETGSLKLANGRVIEKTLYNRRTRQDEPALFVALTFERREVLDSSNIKPMNLIGVDRGENIPAVIALTDPEGCPLSRFKDSLGNPTHILRIGESYKEKQRTIQAKKEVEQRRAGGYSRKYASKAKNLADDMVRNTARDLLYYAVTQDAMLIFENLSRGFGRQGKRTFMAERQYTRMEDWLTAKLAYEGLPSKTYLSKTLAQYTSKTCSNCGFTITSADYDRVLEKLKKTATGWMTTINGKELKVEGQITYYNRYKRQNVVKDLSVELDRLSEESVNNDISSWTKGRSGEALSLLKKRFSHRPVQEKFVCLNCGFETHADEQAALNIARSWLFLRSQEYKKYQTNKTTGNTDKRAFVETWQSFYRKKLKEVWKPAV

SEQ ID NO: 9391 - protein, 978 aa, synthetic construct
QEGKRINKIRRRLVKDSNTKKAGKTGPMKTLLVRVMTPDLRERLENLRKKPENIPQPISNTSRANLNKLLTDYTEMKKAILHVYWEEFQKDPVGLMSRVAQPASKKIDQNKLKPEMDEKGNLTTAGFACSQCGQPLFVYKLEQVSEKGKAYTNYFGRCNVAEHEKLILLAQLKPEKDSDEAVTYSLGKFGQRALDFYSIHVTKESTHPVKPLAQIAGNRYASGPVGKALSDACMGTIASFLSKYQDIIIEHQKVVKGNQKRLESLRELAGKENLEYPSVTLPPQPHTKEGVDAYNEVIARVRMWVNLNLWQKLKLSRDDAKPLLRLKGFPSFPLVERQANEVDWWDMVCNVKKLINEKKEDGKVFWQNLAGYKRQEALRPYLSSEEDRKKGKKFARYQLGDLLLHLEKKHGEDWGKVYDEAWERIDKKVEGLSKHIKLEEERRSEDAQSKAALTDWLRAKASFVIEGLKEADKDEFCRCELKLQKWYGDLRGKPFAIEAENSILDISGFSKQYNCAFIWQKDGVKKLNLYLIINYFKGGKLRFKKIKPEAFEANRFYTVINKKSGEIVPMEVNFNFDDPNLIILPLAFGKRQGREFIWNDLLSLETGSLKLANGRVIEKTLYNRRTRQDEPALFVALTFERREVLDSSNIKPMNLIGVDRGENIPAVIALTDPEGCPLSRFKDSLGNPTHILRIGESYKEKQRTIQAKKEVEQRRAGGYSRKYASKAKNLADDMVRNTARDLLYYAVTQDAMLIFENLSRGFGRQGKRTFMAERQYTRMEDWLTAKLAYEGLPSKTYLSKTLAQYTSKTCSNCGFTITSADYDRMLEKLKKTATGWMTTINGKELKVEGQITYYNRYKRQNVVKDLSVELDRLSEESVNNDISSWTKGRSGEALSLLKKRFSHRPVQEKFVCLNCGFETHADEQAALNIARSWLFLRSQEYKKYQTNKTTGNTDKRAFVETWQSFYRKKLKEVWKPAV

SEQ ID NO: 9392 - protein, 978 aa, synthetic construct
QEGKRINKIRRRLVKDSNTKKAGKTGPMKTLLVRVMTPDLRERLENLRKKPENIPQPISNTSRANLNKLLTDYTEMKKAILHVYWEEFQKDPVGLMSRVAQPASKKIDQNKLKPEMDEKGNLTTAGFACSQCGQPLFVYKLEQVSEKGKAYTNYFGRCNVAEHEKLILLAQLKPEKDSDEAVTYSLGKFGQRALDFYSIHVTKESTHPVKPLAQIAGNRYASGPVGKALSDACMGTIASFLSKYQDIIIEHQKVVKGNQKRLESLRELAGKENLEYPSVTLPPQPHTKEGVDAYNEVIARVRMWVNLNLWQKLKLSRDDAKPLLRLKGFPSFPLVERQANEVDWWDMVCNVKKLINEKKEDGKVFWQNLAGYKRQEALRPYLSSEEDRKKGKKFARYQLGDLLLHLEKKHGEDWGKVYDEAWERIDKKVEGLSKHIKLEEERRSEDAQSKAALTDWLRAKASFVIEGLKEADKDEFCRCELKLQKWYGDLRGKPFAIEAENSILDISGFSKQYNCAFIWQKDGVKKLNLYLIINYFKGGKLRFKKIKPEAFEANRFYTVINKKSGEIVPMEVNFNFDDPNLIILPLAFGKRQGREFIWNDLLSLETGSLKLANGRVIEKTLYNRRTRQDEPALFVALTFERREVLDSSNIKPMNLIGVDRGENIPAVIALTDPEGCPLSRFKDSLGNPTHILRIGESYKEKQRTIQAKKEVEQRRAGGYSRKYASKAKNLADDMVRNTARDLLYYAVTQDAMLIFENLSRGFGRQGKRTFMAERQYTRMEDWLTAKLAYEGLPSKTYLSKTLAQYTSKTCSNCGFTITSADYDRVLEKLKKTATGWMTTINGKELKVEGQITYYNRYKRQNVVKDLSVELDRLSEESVNNDISSWDKGRSGEALSLLKKRFSHRPVQEKFVCLNCGFETHADEQAALNIARSWLFLRSQEYKKYQTNKTTGNTDKRAFVETWQSFYRKKLKEVWKPAV

SEQ ID NO: 9393 - protein, 978 aa, synthetic construct
QEGKRINKIRRRLVKDSNTKKAGKTGPMKTLLVRVMTPDLRERLENLRKKPENIPQPISNTSRANLNKLLTDYTEMKKAILHVYWEEFQKDPVGLMSRVAQPASKKIDQNKLKPEMDEKGNLTTAGFACSQCGQPLFVYKLEQVSEKGKAYTNYFGRCNVAEHEKLILLAQLKPEKDSDEAVTYSLGKFGQRALDFYSIHVTKESTHPVKPLAQIAGNRYASGPVGKALSDACMGTIASFLSKYQDIIIEHQKVVKGNQKRLESLRELAGKENLEYPSVTLPPQPHTKEGVDAYNEVIARVRMWVNLNLWQKLKLSRDDAKPLLRLKGFPSFPLVERQANEVDWWDMVCNVKKLINEKKEDGKVFWQNLAGYKRQEALRPYLSSEEDRKKGKKFARYQLGDLLLHLEKKHGEDWGKVYDEAWERIDKKVEGLSKHIKLEEERRSEDAQSKAALTDWLRAKASFVIEGLKEADKDEFCRCELKLQKWYGDLRGKPFAIEAENSILDISGFSKQYNCAFIWQKDGVKKLNLYLIINYFKGGKLRFKKIKPEAFEANRFYTVINKKSGEIVPMEVNFNFDDPNLIILPLAFGKRQGREFIWNDLLSLETGSLKLANGRVIEKTLYNRRTRQDEPALFVALTFERREVLDSSNIKPMNLIGVDRGENIPAVIALTDPEGCPLSRFKDSLGNPTHILRIGESYKEKQRTIQAKKEVEQRRAGGYSRKYASKAKNLADDMVRNTARDLLYYAVTQDAMLIFENLSRGFGRQGKRTFMAERQYTRMEDWLTAKLAYEGLPSKTYLSKTLAQYTSKTCSNCGFTITSADYDRVLEKLKKTATGWMTTINGKELKVEGQITYYNRYKRQNVVKDLSVELDRLSEESVNNDISSWTKGRQGEALSLLKKRFSHRPVQEKFVCLNCGFETHADEQAALNIARSWLFLRSQEYKKYQTNKTTGNTDKRAFVETWQSFYRKKLKEVWKPAV

SEQ ID NO: 9394 - protein, 979 aa, synthetic construct
QEIGKRINKIRRRLVKDSNTKKAGKTGPMKTLLVRVMTPDLRERLENLRKKPENIPQPISNTSQANLNKLLTDYTEMKKAILHVYWEEFQKDPVGLMSRVAQPASKKIDQNKLKPEMDEKGNLTTAGFACSQCGQPLFVYKLEQVSEKGKAYTNYFGRCNVAEHEKLILLAQLKPEKDSDEAVTYSLGKFGQRALDFYSIHVTKESTHPVKPLAQIAGNRYASGPVGKALSDACMGTIASFLSKYQDIIIEHQKVVKGNQKRLESLRELAGKENLEYPSVTLPPQPHTKEGVDAYNEVIARVRMWVNLNLWQKLKLSRDDAKPLLRLKGFPSFPLVERQANEVDWWDMVCNVKKLINEKKEDGKVFWQNLAGYKRQEALRPYLSSEEDRKKGKKFARYQLGDLLLHLEKKHGEDWGKVYDEAWERIDKKVEGLSKHIKLEEERRSEDAQSKAALTDWLRAKASFVIEGLKEADKDEFCRCELKLQKWYGDLRGKPFAIEAENSILDISGFSKQYNCAFIWQKDGVKKLNLYLIINYFKGGKLRFKKIKPEAFEANRFYTVINKKSGEIVPMEVNFNFDDPNLIILPLAFGKRQGREFIWNDLLSLETGSLKLANGRVIEKTLYNRRTRQDEPALFVALTFERREVLDSSNIKPMNLIGVDRGENIPAVIALTDPEGCPLSRFKDSLGNPTHILRIGESYKEKQRTIQAKKEVEQRRAGGYSRKYASKAKNLADDMVRNTARDLLYYAVTQDAMLIFENLSRGFGRQGKRTFMAERQYTRMEDWLTAKLAYEGLPSKTYLSKTLAQYTSKTCSNCGFTITSADYDRVLEKLKKTATGWMTTINGKELKVEGQITYYNRYKRQNVVKDLSVELDRLSEESVNNDISSWTKGRSGEALSLLKKRFSHRPVQEKFVCLNCGFETHADEQAALNIARSWLFLRSQEYKKYQTNKTTGNTDKRAFVETWQSFYRKKLKEVWKPAV

SEQ ID NO: 9395 - protein, 979 aa, synthetic construct
QEIGKRINKIRRRLVKDSNTKKAGKTGPMKTLLVRVMTPDLRERLENLRKKPENIPQPISNTSRANLNKLLTDYTEMKKAILHVYWEEFQKDPVGLMSRVAQPASKKIDQNKLKPEMDEKGNLTTAGFACSQCGQPLFVYKLEQVSEKGKAYTNYFGRCNVAEHEKLIKLAQLKPEKDSDEAVTYSLGKFGQRALDFYSIHVTKESTHPVKPLAQIAGNRYASGPVGKALSDACMGTIASFLSKYQDIIIEHQKVVKGNQKRLESLRELAGKENLEYPSVTLPPQPHTKEGVDAYNEVIARVRMWVNLNLWQKLKLSRDDAKPLLRLKGFPSFPLVERQANEVDWWDMVCNVKKLINEKKEDGKVFWQNLAGYKRQEALRPYLSSEEDRKKGKKFARYQLGDLLLHLEKKHGEDWGKVYDEAWERIDKKVEGLSKHIKLEEERRSEDAQSKAALTDWLRAKASFVIEGLKEADKDEFCRCELKLQKWYGDLRGKPFAIEAENSILDISGFSKQYNCAFIWQKDGVKKLNLYLIINYFKGGKLRFKKIKPEAFEANRFYTVINKKSGEIVPMEVNFNFDDPNLIILPLAFGKRQGREFIWNDLLSLETGSLKLANGRVIEKTLYNRRTRQDEPALFVALTFERREVLDSSNIKPMNLIGVDRGENIPAVIALTDPEGCPLSRFKDSLGNPTHILRIGESYKEKQRTIQAKKEVEQRRAGGYSRKYASKAKNLADDMVRNTARDLLYYAVTQDAMLIFENLSRGFGRQGKRTFMAERQYTRMEDWLTAKLAYEGLPSKTYLSKTLAQYTSKTCSNCGFTITSADYDRVLEKLKKTATGWMTTINGKELKVEGQITYYNRYKRQNVVKDLSVELDRLSEESVNNDISSWTKGRSGEALSLLKKRFSHRPVQEKFVCLNCGFETHADEQAALNIARSWLFLRSQEYKKYQTNKTTGNTDKRAFVETWQSFYRKKLKEVWKPAV

SEQ ID NO: 9396 - protein, 979 aa, synthetic construct
QEIGKRINKIRRRLVKDSNTKKAGKTGPMKTLLVRVMTPDLRERLENLRKKPENIPQPISNTSRANLNKLLTDYTEMKKAILHVYWEEFQKDPVGLMSRVAQPASKKIDQNKLKPEMDEKGNLTTAGFACSQCGQPLFVYKLEQVSEKGKAYTNYFGRCNVAEHEKLIQLAQLKPEKDSDEAVTYSLGKFGQRALDFYSIHVTKESTHPVKPLAQIAGNRYASGPVGKALSDACMGTIASFLSKYQDIIIEHQKVVKGNQKRLESLRELAGKENLEYPSVTLPPQPHTKEGVDAYNEVIARVRMWVNLNLWQKLKLSRDDAKPLLRLKGFPSFPLVERQANEVDWWDMVCNVKKLINEKKEDGKVFWQNLAGYKRQEALRPYLSSEEDRKKGKKFARYQLGDLLLHLEKKHGEDWGKVYDEAWERIDKKVEGLSKHIKLEEERRSEDAQSKAALTDWLRAKASFVIEGLKEADKDEFCRCELKLQKWYGDLRGKPFAIEAENSILDISGFSKQYNCAFIWQKDGVKKLNLYLIINYFKGGKLRFKKIKPEAFEANRFYTVINKKSGEIVPMEVNFNFDDPNLIILPLAFGKRQGREFIWNDLLSLETGSLKLANGRVIEKTLYNRRTRQDEPALFVALTFERREVLDSSNIKPMNLIGVDRGENIPAVIALTDPEGCPLSRFKDSLGNPTHILRIGESYKEKQRTIQAKKEVEQRRAGGYSRKYASKAKNLADDMVRNTARDLLYYAVTQDAMLIFENLSRGFGRQGKRTFMAERQYTRMEDWLTAKLAYEGLPSKTYLSKTLAQYTSKTCSNCGFTITSADYDRVLEKLKKTATGWMTTINGKELKVEGQITYYNRYKRQNVVKDLSVELDRLSEESVNNDISSWTKGRSGEALSLLKKRFSHRPVQEKFVCLNCGFETHADEQAALNIARSWLFLRSQEYKKYQTNKTTGNTDKRAFVETWQSFYRKKLKEVWKPAV

SEQ ID NO: 9397 - protein, 979 aa, synthetic construct
QEIGKRINKIRRRLVKDSNTKKAGKTGPMKTLLVRVMTPDLRERLENLRKKPENIPQPISNTSRANLNKLLTDYTEMKKAILHVYWEEFQKDPVGLMSRVAQPASKKIDQNKLKPEMDEKGNLTTAGFACSQCGQPLFVYKLEQVSEKGKAYTNYFGRCNVAEHEKLILLDQLKPEKDSDEAVTYSLGKFGQRALDFYSIHVTKESTHPVKPLAQIAGNRYASGPVGKALSDACMGTIASFLSKYQDIIIEHQKVVKGNQKRLESLRELAGKENLEYPSVTLPPQPHTKEGVDAYNEVIARVRMWVNLNLWQKLKLSRDDAKPLLRLKGFPSFPLVERQANEVDWWDMVCNVKKLINEKKEDGKVFWQNLAGYKRQEALRPYLSSEEDRKKGKKFARYQLGDLLLHLEKKHGEDWGKVYDEAWERIDKKVEGLSKHIKLEEERRSEDAQSKAALTDWLRAKASFVIEGLKEADKDEFCRCELKLQKWYGDLRGKPFAIEAENSILDISGFSKQYNCAFIWQKDGVKKLNLYLIINYFKGGKLRFKKIKPEAFEANRFYTVINKKSGEIVPMEVNFNFDDPNLIILPLAFGKRQGREFIWNDLLSLETGSLKLANGRVIEKTLYNRRTRQDEPALFVALTFERREVLDSSNIKPMNLIGVDRGENIPAVIALTDPEGCPLSRFKDSLGNPTHILRIGESYKEKQRTIQAKKEVEQRRAGGYSRKYASKAKNLADDMVRNTARDLLYYAVTQDAMLIFENLSRGFGRQGKRTFMAERQYTRMEDWLTAKLAYEGLPSKTYLSKTLAQYTSKTCSNCGFTITSADYDRVLEKLKKTATGWMTTINGKELKVEGQITYYNRYKRQNVVKDLSVELDRLSEESVNNDISSWTKGRSGEALSLLKKRFSHRPVQEKFVCLNCGFETHADEQAALNIARSWLFLRSQEYKKYQTNKTTGNTDKRAFVETWQSFYRKKLKEVWKPAV

SEQ ID NO: 9398 - protein, 979 aa, synthetic construct
QEIGKRINKIRRRLVKDSNTKKAGKTGPMKTLLVRVMTPDLRERLENLRKKPENIPQPISNTSRANLNKLLTDYTEMKKAILHVYWEEFQKDPVGLMSRVAQPASKKIDQNKLKPEMDEKGNLTTAGFACSQCGQPLFVYKLEQVSEKGKAYTNYFGRCNVAEHEKLILLYQLKPEKDSDEAVTYSLGKFGQRALDFYSIHVTKESTHPVKPLAQIAGNRYASGPVGKALSDACMGTIASFLSKYQDIIIEHQKVVKGNQKRLESLRELAGKENLEYPSVTLPPQPHTKEGVDAYNEVIARVRMWVNLNLWQKLKLSRDDAKPLLRLKGFPSFPLVERQANEVDWWDMVCNVKKLINEKKEDGKVFWQNLAGYKRQEALRPYLSSEEDRKKGKKFARYQLGDLLLHLEKKHGEDWGKVYDEAWERIDKKVEGLSKHIKLEEERRSEDAQSKAALTDWLRAKASFVIEGLKEADKDEFCRCELKLQKWYGDLRGKPFAIEAENSILDISGFSKQYNCAFIWQKDGVKKLNLYLIINYFKGGKLRFKKIKPEAFEANRFYTVINKKSGEIVPMEVNFNFDDPNLIILPLAFGKRQGREFIWNDLLSLETGSLKLANGRVIEKTLYNRRTRQDEPALFVALTFERREVLDSSNIKPMNLIGVDRGENIPAVIALTDPEGCPLSRFKDSLGNPTHILRIGESYKEKQRTIQAKKEVEQRRAGGYSRKYASKAKNLADDMVRNTARDLLYYAVTQDAMLIFENLSRGFGRQGKRTFMAERQYTRMEDWLTAKLAYEGLPSKTYLSKTLAQYTSKTCSNCGFTITSADYDRVLEKLKKTATGWMTTINGKELKVEGQITYYNRYKRQNVVKDLSVELDRLSEESVNNDISSWTKGRSGEALSLLKKRFSHRPVQEKFVCLNCGFETHADEQAALNIARSWLFLRSQEYKKYQTNKTTGNTDKRAFVETWQSFYRKKLKEVWKPAV

SEQ ID NO: 9399 - protein, 979 aa, synthetic construct
QEIGKRINKIRRRLVKDSNTKKAGKTGPMKTLLVRVMTPDLRERLENLRKKPENIPQPISNTSRANLNKLLTDYTEMKKAILHVYWEEFQKDPVGLMSRVAQPASKKIDQNKLKPEMDEKGNLTTAGFACSQCGQPLFVYKLEQVSEKGKAYTNYFGRCNVAEHEKLILLSQLKPEKDSDEAVTYSLGKFGQRALDFYSIHVTKESTHPVKPLAQIAGNRYASGPVGKALSDACMGTIASFLSKYQDIIIEHQKVVKGNQKRLESLRELAGKENLEYPSVTLPPQPHTKEGVDAYNEVIARVRMWVNLNLWQKLKLSRDDAKPLLRLKGFPSFPLVERQANEVDWWDMVCNVKKLINEKKEDGKVFWQNLAGYKRQEALRPYLSSEEDRKKGKKFARYQLGDLLLHLEKKHGEDWGKVYDEAWERIDKKVEGLSKHIKLEEERRSEDAQSKAALTDWLRAKASFVIEGLKEADKDEFCRCELKLQKWYGDLRGKPFAIEAENSILDISGFSKQYNCAFIWQKDGVKKLNLYLIINYFKGGKLRFKKIKPEAFEANRFYTVINKKSGEIVPMEVNFNFDDPNLIILPLAFGKRQGREFIWNDLLSLETGSLKLANGRVIEKTLYNRRTRQDEPALFVALTFERREVLDSSNIKPMNLIGVDRGENIPAVIALTDPEGCPLSRFKDSLGNPTHILRIGESYKEKQRTIQAKKEVEQRRAGGYSRKYASKAKNLADDMVRNTARDLLYYAVTQDAMLIFENLSRGFGRQGKRTFMAERQYTRMEDWLTAKLAYEGLPSKTYLSKTLAQYTSKTCSNCGFTITSADYDRVLEKLKKTATGWMTTINGKELKVEGQITYYNRYKRQNVVKDLSVELDRLSEESVNNDISSWTKGRSGEALSLLKKRFSHRPVQEKFVCLNCGFETHADEQAALNIARSWLFLRSQEYKKYQTNKTTGNTDKRAFVETWQSFYRKKLKEVWKPAV

SEQ ID NO: 9400 - protein, 979 aa, synthetic construct
QEIGKRINKIRRRLVKDSNTKKAGKTGPMKTLLVRVMTPDLRERLENLRKKPENIPQPISNTSRANLNKLLTDYTEMKKAILHVYWEEFQKDPVGLMSRVAQPASKKIDQNKLKPEMDEKGNLTTAGFACSQCGQPLFVYKLEQVSEKGKAYTNYFGRCNVAEHEKLILLAQLKPEKDSDEAVTYSLGKFGQRALDFYSIHVTKESTHPVKPLAQIAGNRYASTPVGKALSDACMGTIASFLSKYQDIIIEHQKVVKGNQKRLESLRELAGKENLEYPSVTLPPQPHTKEGVDAYNEVIARVRMWVNLNLWQKLKLSRDDAKPLLRLKGFPSFPLVERQANEVDWWDMVCNVKKLINEKKEDGKVFWQNLAGYKRQEALRPYLSSEEDRKKGKKFARYQLGDLLLHLEKKHGEDWGKVYDEAWERIDKKVEGLSKHIKLEEERRSEDAQSKAALTDWLRAKASFVIEGLKEADKDEFCRCELKLQKWYGDLRGKPFAIEAENSILDISGFSKQYNCAFIWQKDGVKKLNLYLIINYFKGGKLRFKKIKPEAFEANRFYTVINKKSGEIVPMEVNFNFDDPNLIILPLAFGKRQGREFIWNDLLSLETGSLKLANGRVIEKTLYNRRTRQDEPALFVALTFERREVLDSSNIKPMNLIGVDRGENIPAVIALTDPEGCPLSRFKDSLGNPTHILRIGESYKEKQRTIQAKKEVEQRRAGGYSRKYASKAKNLADDMVRNTARDLLYYAVTQDAMLIFENLSRGFGRQGKRTFMAERQYTRMEDWLTAKLAYEGLPSKTYLSKTLAQYTSKTCSNCGFTITSADYDRVLEKLKKTATGWMTTINGKELKVEGQITYYNRYKRQNVVKDLSVELDRLSEESVNNDISSWTKGRSGEALSLLKKRFSHRPVQEKFVCLNCGFETHADEQAALNIARSWLFLRSQEYKKYQTNKTTGNTDKRAFVETWQSFYRKKLKEVWKPAV

SEQ ID NO: 9401 - protein, 979 aa, synthetic construct
QEIGKRINKIRRRLVKDSNTKKAGKTGPMKTLLVRVMTPDLRERLENLRKKPENIPQPISNTSRANLNKLLTDYTEMKKAILHVYWEEFQKDPVGLMSRVAQPASKKIDQNKLKPEMDEKGNLTTAGFACSQCGQPLFVYKLEQVSEKGKAYTNYFGRCNVAEHEKLILLAQLKPEKDSDEAVTYSLGKFGQRALDFYSIHVTKESTHPVKPLAQIAGNRYASGPVGKALSDACMGTIASFLSKYQDIIIEHQKVVKGNQKRLESLRELAGKENLEYPSVTLPPQPHTKEGVDAYNEVIARVRTWVNLNLWQKLKLSRDDAKPLLRLKGFPSFPLVERQANEVDWWDMVCNVKKLINEKKEDGKVFWQNLAGYKRQEALRPYLSSEEDRKKGKKFARYQLGDLLLHLEKKHGEDWGKVYDEAWERIDKKVEGLSKHIKLEEERRSEDAQSKAALTDWLRAKASFVIEGLKEADKDEFCRCELKLQKWYGDLRGKPFAIEAENSILDISGFSKQYNCAFIWQKDGVKKLNLYLIINYFKGGKLRFKKIKPEAFEANRFYTVINKKSGEIVPMEVNFNFDDPNLIILPLAFGKRQGREFIWNDLLSLETGSLKLANGRVIEKTLYNRRTRQDEPALFVALTFERREVLDSSNIKPMNLIGVDRGENIPAVIALTDPEGCPLSRFKDSLGNPTHILRIGESYKEKQRTIQAKKEVEQRRAGGYSRKYASKAKNLADDMVRNTARDLLYYAVTQDAMLIFENLSRGFGRQGKRTFMAERQYTRMEDWLTAKLAYEGLPSKTYLSKTLAQYTSKTCSNCGFTITSADYDRVLEKLKKTATGWMTTINGKELKVEGQITYYNRYKRQNVVKDLSVELDRLSEESVNNDISSWTKGRSGEALSLLKKRFSHRPVQEKFVCLNCGFETHADEQAALNIARSWLFLRSQEYKKYQTNKTTGNTDKRAFVETWQSFYRKKLKEVWKPAV

SEQ ID NO: 9402 - protein, 979 aa, synthetic construct
QEIGKRINKIRRRLVKDSNTKKAGKTGPMKTLLVRVMTPDLRERLENLRKKPENIPQPISNTSRANLNKLLTDYTEMKKAILHVYWEEFQKDPVGLMSRVAQPASKKIDQNKLKPEMDEKGNLTTAGFACSQCGQPLFVYKLEQVSEKGKAYTNYFGRCNVAEHEKLILLAQLKPEKDSDEAVTYSLGKFGQRALDFYSIHVTKESTHPVKPLAQIAGNRYASGPVGKALSDACMGTIASFLSKYQDIIIEHQKVVKGNQKRLESLRELAGKENLEYPSVTLPPQPHTKEGVDAYNEVIARVRMWVNLNLWQKLKLSRDDAKPLLRLKGFPSFPLVERQANEVDWWDMVCNVKKLINEKKEDGKVFWQNLAGYKRQEALRPYLSSEEDRKKGKKFARTQLGDLLLHLEKKHGEDWGKVYDEAWERIDKKVEGLSKHIKLEEERRSEDAQSKAALTDWLRAKASFVIEGLKEADKDEFCRCELKLQKWYGDLRGKPFAIEAENSILDISGFSKQYNCAFIWQKDGVKKLNLYLIINYFKGGKLRFKKIKPEAFEANRFYTVINKKSGEIVPMEVNFNFDDPNLIILPLAFGKRQGREFIWNDLLSLETGSLKLANGRVIEKTLYNRRTRQDEPALFVALTFERREVLDSSNIKPMNLIGVDRGENIPAVIALTDPEGCPLSRFKDSLGNPTHILRIGESYKEKQRTIQAKKEVEQRRAGGYSRKYASKAKNLADDMVRNTARDLLYYAVTQDAMLIFENLSRGFGRQGKRTFMAERQYTRMEDWLTAKLAYEGLPSKTYLSKTLAQYTSKTCSNCGFTITSADYDRVLEKLKKTATGWMTTINGKELKVEGQITYYNRYKRQNVVKDLSVELDRLSEESVNNDISSWTKGRSGEALSLLKKRFSHRPVQEKFVCLNCGFETHADEQAALNIARSWLFLRSQEYKKYQTNKTTGNTDKRAFVETWQSFYRKKLKEVWKPAV

SEQ ID NO: 9403 - protein, 979 aa, synthetic construct
QEIGKRINKIRRRLVKDSNTKKAGKTGPMKTLLVRVMTPDLRERLENLRKKPENIPQPISNTSRANLNKLLTDYTEMKKAILHVYWEEFQKDPVGLMSRVAQPASKKIDQNKLKPEMDEKGNLTTAGFACSQCGQPLFVYKLEQVSEKGKAYTNYFGRCNVAEHEKLILLAQLKPEKDSDEAVTYSLGKFGQRALDFYSIHVTKESTHPVKPLAQIAGNRYASGPVGKALSDACMGTIASFLSKYQDIIIEHQKVVKGNQKRLESLRELAGKENLEYPSVTLPPQPHTKEGVDAYNEVIARVRMWVNLNLWQKLKLSRDDAKPLLRLKGFPSFPLVERQANEVDWWDMVCNVKKLINEKKEDGKVFWQNLAGYKRQEALRPYLSSEEDRKKGKKFARYQLGDLLLHLEKKHGEDWGKVYDEAWERIDKKVEGLSKHIKLEEERRSEDAQSKAALTDWLRAKASFVIEGLKEADKDEFCRCELKLQKWYGDLRGKPFAIEAENSILDISGFSKQYNCAFIWQKDGVKKLNLYLIINYFKGGKLRFKKIKPEAFEANRFYTVINKKSGEIVPMEVNFNFDDPNLIILPLAFGKRQGREFIWNDLLSLETGSLKLANGRVIEKTLYNRRTRQDEPALFVALTFERREVLDSSNIKPMNLIGVDRGENIPAVIALTDPEGCPLSRFKDSLGNPTHILRIGESYKEKQRTIQAKKEVEQRRAGGYSRKYASKAKNLADDMVRNTARDLLYYAVTQDAMLIFENLSRGFGRQGKRTFMAERQYTRMEDWLTAKLAYEGLPSKTYLSKTLAQYTSKTCSNCGFTITSADYDRMLEKLKKTATGWMTTINGKELKVEGQITYYNRYKRQNVVKDLSVELDRLSEESVNNDISSWTKGRSGEALSLLKKRFSHRPVQEKFVCLNCGFETHADEQAALNIARSWLFLRSQEYKKYQTNKTTGNTDKRAFVETWQSFYRKKLKEVWKPAV

SEQ ID NO: 9404 - protein, 979 aa, synthetic construct
QEIGKRINKIRRRLVKDSNTKKAGKTGPMKTLLVRVMTPDLRERLENLRKKPENIPQPISNTSRANLNKLLTDYTEMKKAILHVYWEEFQKDPVGLMSRVAQPASKKIDQNKLKPEMDEKGNLTTAGFACSQCGQPLFVYKLEQVSEKGKAYTNYFGRCNVAEHEKLILLAQLKPEKDSDEAVTYSLGKFGQRALDFYSIHVTKESTHPVKPLAQIAGNRYASGPVGKALSDACMGTIASFLSKYQDIIIEHQKVVKGNQKRLESLRELAGKENLEYPSVTLPPQPHTKEGVDAYNEVIARVRMWVNLNLWQKLKLSRDDAKPLLRLKGFPSFPLVERQANEVDWWDMVCNVKKLINEKKEDGKVFWQNLAGYKRQEALRPYLSSEEDRKKGKKFARYQLGDLLLHLEKKHGEDWGKVYDEAWERIDKKVEGLSKHIKLEEERRSEDAQSKAALTDWLRAKASFVIEGLKEADKDEFCRCELKLQKWYGDLRGKPFAIEAENSILDISGFSKQYNCAFIWQKDGVKKLNLYLIINYFKGGKLRFKKIKPEAFEANRFYTVINKKSGEIVPMEVNFNFDDPNLIILPLAFGKRQGREFIWNDLLSLETGSLKLANGRVIEKTLYNRRTRQDEPALFVALTFERREVLDSSNIKPMNLIGVDRGENIPAVIALTDPEGCPLSRFKDSLGNPTHILRIGESYKEKQRTIQAKKEVEQRRAGGYSRKYASKAKNLADDMVRNTARDLLYYAVTQDAMLIFENLSRGFGRQGKRTFMAERQYTRMEDWLTAKLAYEGLPSKTYLSKTLAQYTSKTCSNCGFTITSADYDRVLEKLKKTATGWMTTINGKELKVEGQITYYNRYKRQNVVKDLSVELDRLSEESVNNDISSWDKGRSGEALSLLKKRFSHRPVQEKFVCLNCGFETHADEQAALNIARSWLFLRSQEYKKYQTNKTTGNTDKRAFVETWQSFYRKKLKEVWKPAV

SEQ ID NO: 9405 - protein, 979 aa, synthetic construct
QEIGKRINKIRRRLVKDSNTKKAGKTGPMKTLLVRVMTPDLRERLENLRKKPENIPQPISNTSRANLNKLLTDYTEMKKAILHVYWEEFQKDPVGLMSRVAQPASKKIDQNKLKPEMDEKGNLTTAGFACSQCGQPLFVYKLEQVSEKGKAYTNYFGRCNVAEHEKLILLAQLKPEKDSDEAVTYSLGKFGQRALDFYSIHVTKESTHPVKPLAQIAGNRYASGPVGKALSDACMGTIASFLSKYQDIIIEHQKVVKGNQKRLESLRELAGKENLEYPSVTLPPQPHTKEGVDAYNEVIARVRMWVNLNLWQKLKLSRDDAKPLLRLKGFPSFPLVERQANEVDWWDMVCNVKKLINEKKEDGKVFWQNLAGYKRQEALRPYLSSEEDRKKGKKFARYQLGDLLLHLEKKHGEDWGKVYDEAWERIDKKVEGLSKHIKLEEERRSEDAQSKAALTDWLRAKASFVIEGLKEADKDEFCRCELKLQKWYGDLRGKPFAIEAENSILDISGFSKQYNCAFIWQKDGVKKLNLYLIINYFKGGKLRFKKIKPEAFEANRFYTVINKKSGEIVPMEVNFNFDDPNLIILPLAFGKRQGREFIWNDLLSLETGSLKLANGRVIEKTLYNRRTRQDEPALFVALTFERREVLDSSNIKPMNLIGVDRGENIPAVIALTDPEGCPLSRFKDSLGNPTHILRIGESYKEKQRTIQAKKEVEQRRAGGYSRKYASKAKNLADDMVRNTARDLLYYAVTQDAMLIFENLSRGFGRQGKRTFMAERQYTRMEDWLTAKLAYEGLPSKTYLSKTLAQYTSKTCSNCGFTITSADYDRVLEKLKKTATGWMTTINGKELKVEGQITYYNRYKRQNVVKDLSVELDRLSEESVNNDISSWTKGRQGEALSLLKKRFSHRPVQEKFVCLNCGFETHADEQAALNIARSWLFLRSQEYKKYQTNKTTGNTDKRAFVETWQSFYRKKLKEVWKPAV

SEQ ID NO: 9406 - protein, 978 aa, synthetic construct
QEIKRINGIRRRLVKDSNTKKAGKTGPMKTLLVRVMTPDLRERLENLRKKPENIPQPISNTSQANLNKLLTDYTEMKKAILHVYWEEFQKDPVGLMSRVAQPASKKIDQNKLKPEMDEKGNLTTAGFACSQCGQPLFVYKLEQVSEKGKAYTNYFGRCNVAEHEKLILLAQLKPEKDSDEAVTYSLGKFGQRALDFYSIHVTKESTHPVKPLAQIAGNRYASGPVGKALSDACMGTIASFLSKYQDIIIEHQKVVKGNQKRLESLRELAGKENLEYPSVTLPPQPHTKEGVDAYNEVIARVRMWVNLNLWQKLKLSRDDAKPLLRLKGFPSFPLVERQANEVDWWDMVCNVKKLINEKKEDGKVFWQNLAGYKRQEALRPYLSSEEDRKKGKKFARYQLGDLLLHLEKKHGEDWGKVYDEAWERIDKKVEGLSKHIKLEEERRSEDAQSKAALTDWLRAKASFVIEGLKEADKDEFCRCELKLQKWYGDLRGKPFAIEAENSILDISGFSKQYNCAFIWQKDGVKKLNLYLIINYFKGGKLRFKKIKPEAFEANRFYTVINKKSGEIVPMEVNFNFDDPNLIILPLAFGKRQGREFIWNDLLSLETGSLKLANGRVIEKTLYNRRTRQDEPALFVALTFERREVLDSSNIKPMNLIGVDRGENIPAVIALTDPEGCPLSRFKDSLGNPTHILRIGESYKEKQRTIQAKKEVEQRRAGGYSRKYASKAKNLADDMVRNTARDLLYYAVTQDAMLIFENLSRGFGRQGKRTFMAERQYTRMEDWLTAKLAYEGLPSKTYLSKTLAQYTSKTCSNCGFTITSADYDRVLEKLKKTATGWMTTINGKELKVEGQITYYNRYKRQNVVKDLSVELDRLSEESVNNDISSWTKGRSGEALSLLKKRFSHRPVQEKFVCLNCGFETHADEQAALNIARSWLFLRSQEYKKYQTNKTTGNTDKRAFVETWQSFYRKKLKEVWKPAV

SEQ ID NO: 9407 - protein, 978 aa, synthetic construct
QEIKRINGIRRRLVKDSNTKKAGKTGPMKTLLVRVMTPDLRERLENLRKKPENIPQPISNTSRANLNKLLTDYTEMKKAILHVYWEEFQKDPVGLMSRVAQPASKKIDQNKLKPEMDEKGNLTTAGFACSQCGQPLFVYKLEQVSEKGKAYTNYFGRCNVAEHEKLIKLAQLKPEKDSDEAVTYSLGKFGQRALDFYSIHVTKESTHPVKPLAQIAGNRYASGPVGKALSDACMGTIASFLSKYQDIIIEHQKVVKGNQKRLESLRELAGKENLEYPSVTLPPQPHTKEGVDAYNEVIARVRMWVNLNLWQKLKLSRDDAKPLLRLKGFPSFPLVERQANEVDWWDMVCNVKKLINEKKEDGKVFWQNLAGYKRQEALRPYLSSEEDRKKGKKFARYQLGDLLLHLEKKHGEDWGKVYDEAWERIDKKVEGLSKHIKLEEERRSEDAQSKAALTDWLRAKASFVIEGLKEADKDEFCRCELKLQKWYGDLRGKPFAIEAENSILDISGFSKQYNCAFIWQKDGVKKLNLYLIINYFKGGKLRFKKIKPEAFEANRFYTVINKKSGEIVPMEVNFNFDDPNLIILPLAFGKRQGREFIWNDLLSLETGSLKLANGRVIEKTLYNRRTRQDEPALFVALTFERREVLDSSNIKPMNLIGVDRGENIPAVIALTDPEGCPLSRFKDSLGNPTHILRIGESYKEKQRTIQAKKEVEQRRAGGYSRKYASKAKNLADDMVRNTARDLLYYAVTQDAMLIFENLSRGFGRQGKRTFMAERQYTRMEDWLTAKLAYEGLPSKTYLSKTLAQYTSKTCSNCGFTITSADYDRVLEKLKKTATGWMTTINGKELKVEGQITYYNRYKRQNVVKDLSVELDRLSEESVNNDISSWTKGRSGEALSLLKKRFSHRPVQEKFVCLNCGFETHADEQAALNIARSWLFLRSQEYKKYQTNKTTGNTDKRAFVETWQSFYRKKLKEVWKPAV

SEQ ID NO: 9408 - protein, 978 aa, synthetic construct
QEIKRINGIRRRLVKDSNTKKAGKTGPMKTLLVRVMTPDLRERLENLRKKPENIPQPISNTSRANLNKLLTDYTEMKKAILHVYWEEFQKDPVGLMSRVAQPASKKIDQNKLKPEMDEKGNLTTAGFACSQCGQPLFVYKLEQVSEKGKAYTNYFGRCNVAEHEKLIQLAQLKPEKDSDEAVTYSLGKFGQRALDFYSIHVTKESTHPVKPLAQIAGNRYASGPVGKALSDACMGTIASFLSKYQDIIIEHQKVVKGNQKRLESLRELAGKENLEYPSVTLPPQPHTKEGVDAYNEVIARVRMWVNLNLWQKLKLSRDDAKPLLRLKGFPSFPLVERQANEVDWWDMVCNVKKLINEKKEDGKVFWQNLAGYKRQEALRPYLSSEEDRKKGKKFARYQLGDLLLHLEKKHGEDWGKVYDEAWERIDKKVEGLSKHIKLEEERRSEDAQSKAALTDWLRAKASFVIEGLKEADKDEFCRCELKLQKWYGDLRGKPFAIEAENSILDISGFSKQYNCAFIWQKDGVKKLNLYLIINYFKGGKLRFKKIKPEAFEANRFYTVINKKSGEIVPMEVNFNFDDPNLIILPLAFGKRQGREFIWNDLLSLETGSLKLANGRVIEKTLYNRRTRQDEPALFVALTFERREVLDSSNIKPMNLIGVDRGENIPAVIALTDPEGCPLSRFKDSLGNPTHILRIGESYKEKQRTIQAKKEVEQRRAGGYSRKYASKAKNLADDMVRNTARDLLYYAVTQDAMLIFENLSRGFGRQGKRTFMAERQYTRMEDWLTAKLAYEGLPSKTYLSKTLAQYTSKTCSNCGFTITSADYDRVLEKLKKTATGWMTTINGKELKVEGQITYYNRYKRQNVVKDLSVELDRLSEESVNNDISSWTKGRSGEALSLLKKRFSHRPVQEKFVCLNCGFETHADEQAALNIARSWLFLRSQEYKKYQTNKTTGNTDKRAFVETWQSFYRKKLKEVWKPAV

SEQ ID NO: 9409 - protein, 978 aa, synthetic construct
QEIKRINGIRRRLVKDSNTKKAGKTGPMKTLLVRVMTPDLRERLENLRKKPENIPQPISNTSRANLNKLLTDYTEMKKAILHVYWEEFQKDPVGLMSRVAQPASKKIDQNKLKPEMDEKGNLTTAGFACSQCGQPLFVYKLEQVSEKGKAYTNYFGRCNVAEHEKLILLDQLKPEKDSDEAVTYSLGKFGQRALDFYSIHVTKESTHPVKPLAQIAGNRYASGPVGKALSDACMGTIASFLSKYQDIIIEHQKVVKGNQKRLESLRELAGKENLEYPSVTLPPQPHTKEGVDAYNEVIARVRMWVNLNLWQKLKLSRDDAKPLLRLKGFPSFPLVERQANEVDWWDMVCNVKKLINEKKEDGKVFWQNLAGYKRQEALRPYLSSEEDRKKGKKFARYQLGDLLLHLEKKHGEDWGKVYDEAWERIDKKVEGLSKHIKLEEERRSEDAQSKAALTDWLRAKASFVIEGLKEADKDEFCRCELKLQKWYGDLRGKPFAIEAENSILDISGFSKQYNCAFIWQKDGVKKLNLYLIINYFKGGKLRFKKIKPEAFEANRFYTVINKKSGEIVPMEVNFNFDDPNLIILPLAFGKRQGREFIWNDLLSLETGSLKLANGRVIEKTLYNRRTRQDEPALFVALTFERREVLDSSNIKPMNLIGVDRGENIPAVIALTDPEGCPLSRFKDSLGNPTHILRIGESYKEKQRTIQAKKEVEQRRAGGYSRKYASKAKNLADDMVRNTARDLLYYAVTQDAMLIFENLSRGFGRQGKRTFMAERQYTRMEDWLTAKLAYEGLPSKTYLSKTLAQYTSKTCSNCGFTITSADYDRVLEKLKKTATGWMTTINGKELKVEGQITYYNRYKRQNVVKDLSVELDRLSEESVNNDISSWTKGRSGEALSLLKKRFSHRPVQEKFVCLNCGFETHADEQAALNIARSWLFLRSQEYKKYQTNKTTGNTDKRAFVETWQSFYRKKLKEVWKPAV

SEQ ID NO: 9410 - protein, 978 aa, synthetic construct
QEIKRINGIRRRLVKDSNTKKAGKTGPMKTLLVRVMTPDLRERLENLRKKPENIPQPISNTSRANLNKLLTDYTEMKKAILHVYWEEFQKDPVGLMSRVAQPASKKIDQNKLKPEMDEKGNLTTAGFACSQCGQPLFVYKLEQVSEKGKAYTNYFGRCNVAEHEKLILLYQLKPEKDSDEAVTYSLGKFGQRALDFYSIHVTKESTHPVKPLAQIAGNRYASGPVGKALSDACMGTIASFLSKYQDIIIEHQKVVKGNQKRLESLRELAGKENLEYPSVTLPPQPHTKEGVDAYNEVIARVRMWVNLNLWQKLKLSRDDAKPLLRLKGFPSFPLVERQANEVDWWDMVCNVKKLINEKKEDGKVFWQNLAGYKRQEALRPYLSSEEDRKKGKKFARYQLGDLLLHLEKKHGEDWGKVYDEAWERIDKKVEGLSKHIKLEEERRSEDAQSKAALTDWLRAKASFVIEGLKEADKDEFCRCELKLQKWYGDLRGKPFAIEAENSILDISGFSKQYNCAFIWQKDGVKKLNLYLIINYFKGGKLRFKKIKPEAFEANRFYTVINKKSGEIVPMEVNFNFDDPNLIILPLAFGKRQGREFIWNDLLSLETGSLKLANGRVIEKTLYNRRTRQDEPALFVALTFERREVLDSSNIKPMNLIGVDRGENIPAVIALTDPEGCPLSRFKDSLGNPTHILRIGESYKEKQRTIQAKKEVEQRRAGGYSRKYASKAKNLADDMVRNTARDLLYYAVTQDAMLIFENLSRGFGRQGKRTFMAERQYTRMEDWLTAKLAYEGLPSKTYLSKTLAQYTSKTCSNCGFTITSADYDRVLEKLKKTATGWMTTINGKELKVEGQITYYNRYKRQNVVKDLSVELDRLSEESVNNDISSWTKGRSGEALSLLKKRFSHRPVQEKFVCLNCGFETHADEQAALNIARSWLFLRSQEYKKYQTNKTTGNTDKRAFVETWQSFYRKKLKEVWKPAV

SEQ ID NO: 9411 - protein, 978 aa, synthetic construct
QEIKRINGIRRRLVKDSNTKKAGKTGPMKTLLVRVMTPDLRERLENLRKKPENIPQPISNTSRANLNKLLTDYTEMKKAILHVYWEEFQKDPVGLMSRVAQPASKKIDQNKLKPEMDEKGNLTTAGFACSQCGQPLFVYKLEQVSEKGKAYTNYFGRCNVAEHEKLILLSQLKPEKDSDEAVTYSLGKFGQRALDFYSIHVTKESTHPVKPLAQIAGNRYASGPVGKALSDACMGTIASFLSKYQDIIIEHQKVVKGNQKRLESLRELAGKENLEYPSVTLPPQPHTKEGVDAYNEVIARVRMWVNLNLWQKLKLSRDDAKPLLRLKGFPSFPLVERQANEVDWWDMVCNVKKLINEKKEDGKVFWQNLAGYKRQEALRPYLSSEEDRKKGKKFARYQLGDLLLHLEKKHGEDWGKVYDEAWERIDKKVEGLSKHIKLEEERRSEDAQSKAALTDWLRAKASFVIEGLKEADKDEFCRCELKLQKWYGDLRGKPFAIEAENSILDISGFSKQYNCAFIWQKDGVKKLNLYLIINYFKGGKLRFKKIKPEAFEANRFYTVINKKSGEIVPMEVNFNFDDPNLIILPLAFGKRQGREFIWNDLLSLETGSLKLANGRVIEKTLYNRRTRQDEPALFVALTFERREVLDSSNIKPMNLIGVDRGENIPAVIALTDPEGCPLSRFKDSLGNPTHILRIGESYKEKQRTIQAKKEVEQRRAGGYSRKYASKAKNLADDMVRNTARDLLYYAVTQDAMLIFENLSRGFGRQGKRTFMAERQYTRMEDWLTAKLAYEGLPSKTYLSKTLAQYTSKTCSNCGFTITSADYDRVLEKLKKTATGWMTTINGKELKVEGQITYYNRYKRQNVVKDLSVELDRLSEESVNNDISSWTKGRSGEALSLLKKRFSHRPVQEKFVCLNCGFETHADEQAALNIARSWLFLRSQEYKKYQTNKTTGNTDKRAFVETWQSFYRKKLKEVWKPAV

SEQ ID NO: 9412 - protein, 978 aa, synthetic construct
QEIKRINGIRRRLVKDSNTKKAGKTGPMKTLLVRVMTPDLRERLENLRKKPENIPQPISNTSRANLNKLLTDYTEMKKAILHVYWEEFQKDPVGLMSRVAQPASKKIDQNKLKPEMDEKGNLTTAGFACSQCGQPLFVYKLEQVSEKGKAYTNYFGRCNVAEHEKLILLAQLKPEKDSDEAVTYSLGKFGQRALDFYSIHVTKESTHPVKPLAQIAGNRYASTPVGKALSDACMGTIASFLSKYQDIIIEHQKVVKGNQKRLESLRELAGKENLEYPSVTLPPQPHTKEGVDAYNEVIARVRMWVNLNLWQKLKLSRDDAKPLLRLKGFPSFPLVERQANEVDWWDMVCNVKKLINEKKEDGKVFWQNLAGYKRQEALRPYLSSEEDRKKGKKFARYQLGDLLLHLEKKHGEDWGKVYDEAWERIDKKVEGLSKHIKLEEERRSEDAQSKAALTDWLRAKASFVIEGLKEADKDEFCRCELKLQKWYGDLRGKPFAIEAENSILDISGFSKQYNCAFIWQKDGVKKLNLYLIINYFKGGKLRFKKIKPEAFEANRFYTVINKKSGEIVPMEVNFNFDDPNLIILPLAFGKRQGREFIWNDLLSLETGSLKLANGRVIEKTLYNRRTRQDEPALFVALTFERREVLDSSNIKPMNLIGVDRGENIPAVIALTDPEGCPLSRFKDSLGNPTHILRIGESYKEKQRTIQAKKEVEQRRAGGYSRKYASKAKNLADDMVRNTARDLLYYAVTQDAMLIFENLSRGFGRQGKRTFMAERQYTRMEDWLTAKLAYEGLPSKTYLSKTLAQYTSKTCSNCGFTITSADYDRVLEKLKKTATGWMTTINGKELKVEGQITYYNRYKRQNVVKDLSVELDRLSEESVNNDISSWTKGRSGEALSLLKKRFSHRPVQEKFVCLNCGFETHADEQAALNIARSWLFLRSQEYKKYQTNKTTGNTDKRAFVETWQSFYRKKLKEVWKPAV

SEQ ID NO: 9413 - protein, 978 aa, synthetic construct
QEIKRINGIRRRLVKDSNTKKAGKTGPMKTLLVRVMTPDLRERLENLRKKPENIPQPISNTSRANLNKLLTDYTEMKKAILHVYWEEFQKDPVGLMSRVAQPASKKIDQNKLKPEMDEKGNLTTAGFACSQCGQPLFVYKLEQVSEKGKAYTNYFGRCNVAEHEKLILLAQLKPEKDSDEAVTYSLGKFGQRALDFYSIHVTKESTHPVKPLAQIAGNRYASGPVGKALSDACMGTIASFLSKYQDIIIEHQKVVKGNQKRLESLRELAGKENLEYPSVTLPPQPHTKEGVDAYNEVIARVRTWVNLNLWQKLKLSRDDAKPLLRLKGFPSFPLVERQANEVDWWDMVCNVKKLINEKKEDGKVFWQNLAGYKRQEALRPYLSSEEDRKKGKKFARYQLGDLLLHLEKKHGEDWGKVYDEAWERIDKKVEGLSKHIKLEEERRSEDAQSKAALTDWLRAKASFVIEGLKEADKDEFCRCELKLQKWYGDLRGKPFAIEAENSILDISGFSKQYNCAFIWQKDGVKKLNLYLIINYFKGGKLRFKKIKPEAFEANRFYTVINKKSGEIVPMEVNFNFDDPNLIILPLAFGKRQGREFIWNDLLSLETGSLKLANGRVIEKTLYNRRTRQDEPALFVALTFERREVLDSSNIKPMNLIGVDRGENIPAVIALTDPEGCPLSRFKDSLGNPTHILRIGESYKEKQRTIQAKKEVEQRRAGGYSRKYASKAKNLADDMVRNTARDLLYYAVTQDAMLIFENLSRGFGRQGKRTFMAERQYTRMEDWLTAKLAYEGLPSKTYLSKTLAQYTSKTCSNCGFTITSADYDRVLEKLKKTATGWMTTINGKELKVEGQITYYNRYKRQNVVKDLSVELDRLSEESVNNDISSWTKGRSGEALSLLKKRFSHRPVQEKFVCLNCGFETHADEQAALNIARSWLFLRSQEYKKYQTNKTTGNTDKRAFVETWQSFYRKKLKEVWKPAV

SEQ ID NO: 9414 - protein, 978 aa, synthetic construct
QEIKRINGIRRRLVKDSNTKKAGKTGPMKTLLVRVMTPDLRERLENLRKKPENIPQPISNTSRANLNKLLTDYTEMKKAILHVYWEEFQKDPVGLMSRVAQPASKKIDQNKLKPEMDEKGNLTTAGFACSQCGQPLFVYKLEQVSEKGKAYTNYFGRCNVAEHEKLILLAQLKPEKDSDEAVTYSLGKFGQRALDFYSIHVTKESTHPVKPLAQIAGNRYASGPVGKALSDACMGTIASFLSKYQDIIIEHQKVVKGNQKRLESLRELAGKENLEYPSVTLPPQPHTKEGVDAYNEVIARVRMWVNLNLWQKLKLSRDDAKPLLRLKGFPSFPLVERQANEVDWWDMVCNVKKLINEKKEDGKVFWQNLAGYKRQEALRPYLSSEEDRKKGKKFARTQLGDLLLHLEKKHGEDWGKVYDEAWERIDKKVEGLSKHIKLEEERRSEDAQSKAALTDWLRAKASFVIEGLKEADKDEFCRCELKLQKWYGDLRGKPFAIEAENSILDISGFSKQYNCAFIWQKDGVKKLNLYLIINYFKGGKLRFKKIKPEAFEANRFYTVINKKSGEIVPMEVNFNFDDPNLIILPLAFGKRQGREFIWNDLLSLETGSLKLANGRVIEKTLYNRRTRQDEPALFVALTFERREVLDSSNIKPMNLIGVDRGENIPAVIALTDPEGCPLSRFKDSLGNPTHILRIGESYKEKQRTIQAKKEVEQRRAGGYSRKYASKAKNLADDMVRNTARDLLYYAVTQDAMLIFENLSRGFGRQGKRTFMAERQYTRMEDWLTAKLAYEGLPSKTYLSKTLAQYTSKTCSNCGFTITSADYDRVLEKLKKTATGWMTTINGKELKVEGQITYYNRYKRQNVVKDLSVELDRLSEESVNNDISSWTKGRSGEALSLLKKRFSHRPVQEKFVCLNCGFETHADEQAALNIARSWLFLRSQEYKKYQTNKTTGNTDKRAFVETWQSFYRKKLKEVWKPAV

SEQ ID NO: 9415 - protein, 978 aa, synthetic construct
QEIKRINGIRRRLVKDSNTKKAGKTGPMKTLLVRVMTPDLRERLENLRKKPENIPQPISNTSRANLNKLLTDYTEMKKAILHVYWEEFQKDPVGLMSRVAQPASKKIDQNKLKPEMDEKGNLTTAGFACSQCGQPLFVYKLEQVSEKGKAYTNYFGRCNVAEHEKLILLAQLKPEKDSDEAVTYSLGKFGQRALDFYSIHVTKESTHPVKPLAQIAGNRYASGPVGKALSDACMGTIASFLSKYQDIIIEHQKVVKGNQKRLESLRELAGKENLEYPSVTLPPQPHTKEGVDAYNEVIARVRMWVNLNLWQKLKLSRDDAKPLLRLKGFPSFPLVERQANEVDWWDMVCNVKKLINEKKEDGKVFWQNLAGYKRQEALRPYLSSEEDRKKGKKFARYQLGDLLLHLEKKHGEDWGKVYDEAWERIDKKVEGLSKHIKLEEERRSEDAQSKAALTDWLRAKASFVIEGLKEADKDEFCRCELKLQKWYGDLRGKPFAIEAENSILDISGFSKQYNCAFIWQKDGVKKLNLYLIINYFKGGKLRFKKIKPEAFEANRFYTVINKKSGEIVPMEVNFNFDDPNLIILPLAFGKRQGREFIWNDLLSLETGSLKLANGRVIEKTLYNRRTRQDEPALFVALTFERREVLDSSNIKPMNLIGVDRGENIPAVIALTDPEGCPLSRFKDSLGNPTHILRIGESYKEKQRTIQAKKEVEQRRAGGYSRKYASKAKNLADDMVRNTARDLLYYAVTQDAMLIFENLSRGFGRQGKRTFMAERQYTRMEDWLTAKLAYEGLPSKTYLSKTLAQYTSKTCSNCGFTITSADYDRMLEKLKKTATGWMTTINGKELKVEGQITYYNRYKRQNVVKDLSVELDRLSEESVNNDISSWTKGRSGEALSLLKKRFSHRPVQEKFVCLNCGFETHADEQAALNIARSWLFLRSQEYKKYQTNKTTGNTDKRAFVETWQSFYRKKLKEVWKPAV

SEQ ID NO: 9416 - protein, 978 aa, synthetic construct
QEIKRINGIRRRLVKDSNTKKAGKTGPMKTLLVRVMTPDLRERLENLRKKPENIPQPISNTSRANLNKLLTDYTEMKKAILHVYWEEFQKDPVGLMSRVAQPASKKIDQNKLKPEMDEKGNLTTAGFACSQCGQPLFVYKLEQVSEKGKAYTNYFGRCNVAEHEKLILLAQLKPEKDSDEAVTYSLGKFGQRALDFYSIHVTKESTHPVKPLAQIAGNRYASGPVGKALSDACMGTIASFLSKYQDIIIEHQKVVKGNQKRLESLRELAGKENLEYPSVTLPPQPHTKEGVDAYNEVIARVRMWVNLNLWQKLKLSRDDAKPLLRLKGFPSFPLVERQANEVDWWDMVCNVKKLINEKKEDGKVFWQNLAGYKRQEALRPYLSSEEDRKKGKKFARYQLGDLLLHLEKKHGEDWGKVYDEAWERIDKKVEGLSKHIKLEEERRSEDAQSKAALTDWLRAKASFVIEGLKEADKDEFCRCELKLQKWYGDLRGKPFAIEAENSILDISGFSKQYNCAFIWQKDGVKKLNLYLIINYFKGGKLRFKKIKPEAFEANRFYTVINKKSGEIVPMEVNFNFDDPNLIILPLAFGKRQGREFIWNDLLSLETGSLKLANGRVIEKTLYNRRTRQDEPALFVALTFERREVLDSSNIKPMNLIGVDRGENIPAVIALTDPEGCPLSRFKDSLGNPTHILRIGESYKEKQRTIQAKKEVEQRRAGGYSRKYASKAKNLADDMVRNTARDLLYYAVTQDAMLIFENLSRGFGRQGKRTFMAERQYTRMEDWLTAKLAYEGLPSKTYLSKTLAQYTSKTCSNCGFTITSADYDRVLEKLKKTATGWMTTINGKELKVEGQITYYNRYKRQNVVKDLSVELDRLSEESVNNDISSWDKGRSGEALSLLKKRFSHRPVQEKFVCLNCGFETHADEQAALNIARSWLFLRSQEYKKYQTNKTTGNTDKRAFVETWQSFYRKKLKEVWKPAV

SEQ ID NO: 9417 - protein, 978 aa, synthetic construct
QEIKRINGIRRRLVKDSNTKKAGKTGPMKTLLVRVMTPDLRERLENLRKKPENIPQPISNTSRANLNKLLTDYTEMKKAILHVYWEEFQKDPVGLMSRVAQPASKKIDQNKLKPEMDEKGNLTTAGFACSQCGQPLFVYKLEQVSEKGKAYTNYFGRCNVAEHEKLILLAQLKPEKDSDEAVTYSLGKFGQRALDFYSIHVTKESTHPVKPLAQIAGNRYASGPVGKALSDACMGTIASFLSKYQDIIIEHQKVVKGNQKRLESLRELAGKENLEYPSVTLPPQPHTKEGVDAYNEVIARVRMWVNLNLWQKLKLSRDDAKPLLRLKGFPSFPLVERQANEVDWWDMVCNVKKLINEKKEDGKVFWQNLAGYKRQEALRPYLSSEEDRKKGKKFARYQLGDLLLHLEKKHGEDWGKVYDEAWERIDKKVEGLSKHIKLEEERRSEDAQSKAALTDWLRAKASFVIEGLKEADKDEFCRCELKLQKWYGDLRGKPFAIEAENSILDISGFSKQYNCAFIWQKDGVKKLNLYLIINYFKGGKLRFKKIKPEAFEANRFYTVINKKSGEIVPMEVNFNFDDPNLIILPLAFGKRQGREFIWNDLLSLETGSLKLANGRVIEKTLYNRRTRQDEPALFVALTFERREVLDSSNIKPMNLIGVDRGENIPAVIALTDPEGCPLSRFKDSLGNPTHILRIGESYKEKQRTIQAKKEVEQRRAGGYSRKYASKAKNLADDMVRNTARDLLYYAVTQDAMLIFENLSRGFGRQGKRTFMAERQYTRMEDWLTAKLAYEGLPSKTYLSKTLAQYTSKTCSNCGFTITSADYDRVLEKLKKTATGWMTTINGKELKVEGQITYYNRYKRQNVVKDLSVELDRLSEESVNNDISSWTKGRQGEALSLLKKRFSHRPVQEKFVCLNCGFETHADEQAALNIARSWLFLRSQEYKKYQTNKTTGNTDKRAFVETWQSFYRKKLKEVWKPAV

SEQ ID NO: 9418 - protein, 979 aa, synthetic construct
QEIKRINKIRRRLVKDSNTKKAGKTRGPMKTLLVRVMTPDLRERLENLRKKPENIPQPISNTSQANLNKLLTDYTEMKKAILHVYWEEFQKDPVGLMSRVAQPASKKIDQNKLKPEMDEKGNLTTAGFACSQCGQPLFVYKLEQVSEKGKAYTNYFGRCNVAEHEKLILLAQLKPEKDSDEAVTYSLGKFGQRALDFYSIHVTKESTHPVKPLAQIAGNRYASGPVGKALSDACMGTIASFLSKYQDIIIEHQKVVKGNQKRLESLRELAGKENLEYPSVTLPPQPHTKEGVDAYNEVIARVRMWVNLNLWQKLKLSRDDAKPLLRLKGFPSFPLVERQANEVDWWDMVCNVKKLINEKKEDGKVFWQNLAGYKRQEALRPYLSSEEDRKKGKKFARYQLGDLLLHLEKKHGEDWGKVYDEAWERIDKKVEGLSKHIKLEEERRSEDAQSKAALTDWLRAKASFVIEGLKEADKDEFCRCELKLQKWYGDLRGKPFAIEAENSILDISGFSKQYNCAFIWQKDGVKKLNLYLIINYFKGGKLRFKKIKPEAFEANRFYTVINKKSGEIVPMEVNFNFDDPNLIILPLAFGKRQGREFIWNDLLSLETGSLKLANGRVIEKTLYNRRTRQDEPALFVALTFERREVLDSSNIKPMNLIGVDRGENIPAVIALTDPEGCPLSRFKDSLGNPTHILRIGESYKEKQRTIQAKKEVEQRRAGGYSRKYASKAKNLADDMVRNTARDLLYYAVTQDAMLIFENLSRGFGRQGKRTFMAERQYTRMEDWLTAKLAYEGLPSKTYLSKTLAQYTSKTCSNCGFTITSADYDRVLEKLKKTATGWMTTINGKELKVEGQITYYNRYKRQNVVKDLSVELDRLSEESVNNDISSWTKGRSGEALSLLKKRFSHRPVQEKFVCLNCGFETHADEQAALNIARSWLFLRSQEYKKYQTNKTTGNTDKRAFVETWQSFYRKKLKEVWKPAV

SEQ ID NO: 9419 - protein, 979 aa, synthetic construct; identical to SEQ ID NO: 354

SEQ ID NO: 9420 - protein, 979 aa, synthetic construct
QEIKRINKIRRRLVKDSNTKKAGKTRGPMKTLLVRVMTPDLRERLENLRKKPENIPQPISNTSRANLNKLLTDYTEMKKAILHVYWEEFQKDPVGLMSRVAQPASKKIDQNKLKPEMDEKGNLTTAGFACSQCGQPLFVYKLEQVSEKGKAYTNYFGRCNVAEHEKLIQLAQLKPEKDSDEAVTYSLGKFGQRALDFYSIHVTKESTHPVKPLAQIAGNRYASGPVGKALSDACMGTIASFLSKYQDIIIEHQKVVKGNQKRLESLRELAGKENLEYPSVTLPPQPHTKEGVDAYNEVIARVRMWVNLNLWQKLKLSRDDAKPLLRLKGFPSFPLVERQANEVDWWDMVCNVKKLINEKKEDGKVFWQNLAGYKRQEALRPYLSSEEDRKKGKKFARYQLGDLLLHLEKKHGEDWGKVYDEAWERIDKKVEGLSKHIKLEEERRSEDAQSKAALTDWLRAKASFVIEGLKEADKDEFCRCELKLQKWYGDLRGKPFAIEAENSILDISGFSKQYNCAFIWQKDGVKKLNLYLIINYFKGGKLRFKKIKPEAFEANRFYTVINKKSGEIVPMEVNFNFDDPNLIILPLAFGKRQGREFIWNDLLSLETGSLKLANGRVIEKTLYNRRTRQDEPALFVALTFERREVLDSSNIKPMNLIGVDRGENIPAVIALTDPEGCPLSRFKDSLGNPTHILRIGESYKEKQRTIQAKKEVEQRRAGGYSRKYASKAKNLADDMVRNTARDLLYYAVTQDAMLIFENLSRGFGRQGKRTFMAERQYTRMEDWLTAKLAYEGLPSKTYLSKTLAQYTSKTCSNCGFTITSADYDRVLEKLKKTATGWMTTINGKELKVEGQITYYNRYKRQNVVKDLSVELDRLSEESVNNDISSWTKGRSGEALSLLKKRFSHRPVQEKFVCLNCGFETHADEQAALNIARSWLFLRSQEYKKYQTNKTTGNTDKRAFVETWQSFYRKKLKEVWKPAV

SEQ ID NO: 9421 - protein, 979 aa, synthetic construct
QEIKRINKIRRRLVKDSNTKKAGKTRGPMKTLLVRVMTPDLRERLENLRKKPENIPQPISNTSRANLNKLLTDYTEMKKAILHVYWEEFQKDPVGLMSRVAQPASKKIDQNKLKPEMDEKGNLTTAGFACSQCGQPLFVYKLEQVSEKGKAYTNYFGRCNVAEHEKLILLDQLKPEKDSDEAVTYSLGKFGQRALDFYSIHVTKESTHPVKPLAQIAGNRYASGPVGKALSDACMGTIASFLSKYQDIIIEHQKVVKGNQKRLESLRELAGKENLEYPSVTLPPQPHTKEGVDAYNEVIARVRMWVNLNLWQKLKLSRDDAKPLLRLKGFPSFPLVERQANEVDWWDMVCNVKKLINEKKEDGKVFWQNLAGYKRQEALRPYLSSEEDRKKGKKFARYQLGDLLLHLEKKHGEDWGKVYDEAWERIDKKVEGLSKHIKLEEERRSEDAQSKAALTDWLRAKASFVIEGLKEADKDEFCRCELKLQKWYGDLRGKPFAIEAENSILDISGFSKQYNCAFIWQKDGVKKLNLYLIINYFKGGKLRFKKIKPEAFEANRFYTVINKKSGEIVPMEVNFNFDDPNLIILPLAFGKRQGREFIWNDLLSLETGSLKLANGRVIEKTLYNRRTRQDEPALFVALTFERREVLDSSNIKPMNLIGVDRGENIPAVIALTDPEGCPLSRFKDSLGNPTHILRIGESYKEKQRTIQAKKEVEQRRAGGYSRKYASKAKNLADDMVRNTARDLLYYAVTQDAMLIFENLSRGFGRQGKRTFMAERQYTRMEDWLTAKLAYEGLPSKTYLSKTLAQYTSKTCSNCGFTITSADYDRVLEKLKKTATGWMTTINGKELKVEGQITYYNRYKRQNVVKDLSVELDRLSEESVNNDISSWTKGRSGEALSLLKKRFSHRPVQEKFVCLNCGFETHADEQAALNIARSWLFLRSQEYKKYQTNKTTGNTDKRAFVETWQSFYRKKLKEVWKPAV

SEQ ID NO: 9422 - protein, 979 aa, synthetic construct
QEIKRINKIRRRLVKDSNTKKAGKTRGPMKTLLVRVMTPDLRERLENLRKKPENIPQPISNTSRANLNKLLTDYTEMKKAILHVYWEEFQKDPVGLMSRVAQPASKKIDQNKLKPEMDEKGNLTTAGFACSQCGQPLFVYKLEQVSEKGKAYTNYFGRCNVAEHEKLILLYQLKPEKDSDEAVTYSLGKFGQRALDFYSIHVTKESTHPVKPLAQIAGNRYASGPVGKALSDACMGTIASFLSKYQDIIIEHQKVVKGNQKRLESLRELAGKENLEYPSVTLPPQPHTKEGVDAYNEVIARVRMWVNLNLWQKLKLSRDDAKPLLRLKGFPSFPLVERQANEVDWWDMVCNVKKLINEKKEDGKVFWQNLAGYKRQEALRPYLSSEEDRKKGKKFARYQLGDLLLHLEKKHGEDWGKVYDEAWERIDKKVEGLSKHIKLEEERRSEDAQSKAALTDWLRAKASFVIEGLKEADKDEFCRCELKLQKWYGDLRGKPFAIEAENSILDISGFSKQYNCAFIWQKDGVKKLNLYLIINYFKGGKLRFKKIKPEAFEANRFYTVINKKSGEIVPMEVNFNFDDPNLIILPLAFGKRQGREFIWNDLLSLETGSLKLANGRVIEKTLYNRRTRQDEPALFVALTFERREVLDSSNIKPMNLIGVDRGENIPAVIALTDPEGCPLSRFKDSLGNPTHILRIGESYKEKQRTIQAKKEVEQRRAGGYSRKYASKAKNLADDMVRNTARDLLYYAVTQDAMLIFENLSRGFGRQGKRTFMAERQYTRMEDWLTAKLAYEGLPSKTYLSKTLAQYTSKTCSNCGFTITSADYDRVLEKLKKTATGWMTTINGKELKVEGQITYYNRYKRQNVVKDLSVELDRLSEESVNNDISSWTKGRSGEALSLLKKRFSHRPVQEKFVCLNCGFETHADEQAALNIARSWLFLRSQEYKKYQTNKTTGNTDKRAFVETWQSFYRKKLKEVWKPAV

SEQ ID NO: 9423 - protein, 979 aa, synthetic construct
QEIKRINKIRRRLVKDSNTKKAGKTRGPMKTLLVRVMTPDLRERLENLRKKPENIPQPISNTSRANLNKLLTDYTEMKKAILHVYWEEFQKDPVGLMSRVAQPASKKIDQNKLKPEMDEKGNLTTAGFACSQCGQPLFVYKLEQVSEKGKAYTNYFGRCNVAEHEKLILLSQLKPEKDSDEAVTYSLGKFGQRALDFYSIHVTKESTHPVKPLAQIAGNRYASGPVGKALSDACMGTIASFLSKYQDIIIEHQKVVKGNQKRLESLRELAGKENLEYPSVTLPPQPHTKEGVDAYNEVIARVRMWVNLNLWQKLKLSRDDAKPLLRLKGFPSFPLVERQANEVDWWDMVCNVKKLINEKKEDGKVFWQNLAGYKRQEALRPYLSSEEDRKKGKKFARYQLGDLLLHLEKKHGEDWGKVYDEAWERIDKKVEGLSKHIKLEEERRSEDAQSKAALTDWLRAKASFVIEGLKEADKDEFCRCELKLQKWYGDLRGKPFAIEAENSILDISGFSKQYNCAFIWQKDGVKKLNLYLIINYFKGGKLRFKKIKPEAFEANRFYTVINKKSGEIVPMEVNFNFDDPNLIILPLAFGKRQGREFIWNDLLSLETGSLKLANGRVIEKTLYNRRTRQDEPALFVALTFERREVLDSSNIKPMNLIGVDRGENIPAVIALTDPEGCPLSRFKDSLGNPTHILRIGESYKEKQRTIQAKKEVEQRRAGGYSRKYASKAKNLADDMVRNTARDLLYYAVTQDAMLIFENLSRGFGRQGKRTFMAERQYTRMEDWLTAKLAYEGLPSKTYLSKTLAQYTSKTCSNCGFTITSADYDRVLEKLKKTATGWMTTINGKELKVEGQITYYNRYKRQNVVKDLSVELDRLSEESVNNDISSWTKGRSGEALSLLKKRFSHRPVQEKFVCLNCGFETHADEQAALNIARSWLFLRSQEYKKYQTNKTTGNTDKRAFVETWQSFYRKKLKEVWKPAV

SEQ ID NO: 9424 - protein, 979 aa, synthetic construct
QEIKRINKIRRRLVKDSNTKKAGKTRGPMKTLLVRVMTPDLRERLENLRKKPENIPQPISNTSRANLNKLLTDYTEMKKAILHVYWEEFQKDPVGLMSRVAQPASKKIDQNKLKPEMDEKGNLTTAGFACSQCGQPLFVYKLEQVSEKGKAYTNYFGRCNVAEHEKLILLAQLKPEKDSDEAVTYSLGKFGQRALDFYSIHVTKESTHPVKPLAQIAGNRYASTPVGKALSDACMGTIASFLSKYQDIIIEHQKVVKGNQKRLESLRELAGKENLEYPSVTLPPQPHTKEGVDAYNEVIARVRMWVNLNLWQKLKLSRDDAKPLLRLKGFPSFPLVERQANEVDWWDMVCNVKKLINEKKEDGKVFWQNLAGYKRQEALRPYLSSEEDRKKGKKFARYQLGDLLLHLEKKHGEDWGKVYDEAWERIDKKVEGLSKHIKLEEERRSEDAQSKAALTDWLRAKASFVIEGLKEADKDEFCRCELKLQKWYGDLRGKPFAIEAENSILDISGFSKQYNCAFIWQKDGVKKLNLYLIINYFKGGKLRFKKIKPEAFEANRFYTVINKKSGEIVPMEVNFNFDDPNLIILPLAFGKRQGREFIWNDLLSLETGSLKLANGRVIEKTLYNRRTRQDEPALFVALTFERREVLDSSNIKPMNLIGVDRGENIPAVIALTDPEGCPLSRFKDSLGNPTHILRIGESYKEKQRTIQAKKEVEQRRAGGYSRKYASKAKNLADDMVRNTARDLLYYAVTQDAMLIFENLSRGFGRQGKRTFMAERQYTRMEDWLTAKLAYEGLPSKTYLSKTLAQYTSKTCSNCGFTITSADYDRVLEKLKKTATGWMTTINGKELKVEGQITYYNRYKRQNVVKDLSVELDRLSEESVNNDISSWTKGRSGEALSLLKKRFSHRPVQEKFVCLNCGFETHADEQAALNIARSWLFLRSQEYKKYQTNKTTGNTDKRAFVETWQSFYRKKLKEVWKPAV

SEQ ID NO: 9425 - protein, 979 aa, synthetic construct
QEIKRINKIRRRLVKDSNTKKAGKTRGPMKTLLVRVMTPDLRERLENLRKKPENIPQPISNTSRANLNKLLTDYTEMKKAILHVYWEEFQKDPVGLMSRVAQPASKKIDQNKLKPEMDEKGNLTTAGFACSQCGQPLFVYKLEQVSEKGKAYTNYFGRCNVAEHEKLILLAQLKPEKDSDEAVTYSLGKFGQRALDFYSIHVTKESTHPVKPLAQIAGNRYASGPVGKALSDACMGTIASFLSKYQDIIIEHQKVVKGNQKRLESLRELAGKENLEYPSVTLPPQPHTKEGVDAYNEVIARVRTWVNLNLWQKLKLSRDDAKPLLRLKGFPSFPLVERQANEVDWWDMVCNVKKLINEKKEDGKVFWQNLAGYKRQEALRPYLSSEEDRKKGKKFARYQLGDLLLHLEKKHGEDWGKVYDEAWERIDKKVEGLSKHIKLEEERRSEDAQSKAALTDWLRAKASFVIEGLKEADKDEFCRCELKLQKWYGDLRGKPFAIEAENSILDISGFSKQYNCAFIWQKDGVKKLNLYLIINYFKGGKLRFKKIKPEAFEANRFYTVINKKSGEIVPMEVNFNFDDPNLIILPLAFGKRQGREFIWNDLLSLETGSLKLANGRVIEKTLYNRRTRQDEPALFVALTFERREVLDSSNIKPMNLIGVDRGENIPAVIALTDPEGCPLSRFKDSLGNPTHILRIGESYKEKQRTIQAKKEVEQRRAGGYSRKYASKAKNLADDMVRNTARDLLYYAVTQDAMLIFENLSRGFGRQGKRTFMAERQYTRMEDWLTAKLAYEGLPSKTYLSKTLAQYTSKTCSNCGFTITSADYDRVLEKLKKTATGWMTTINGKELKVEGQITYYNRYKRQNVVKDLSVELDRLSEESVNNDISSWTKGRSGEALSLLKKRFSHRPVQEKFVCLNCGFETHADEQAALNIARSWLFLRSQEYKKYQTNKTTGNTDKRAFVETWQSFYRKKLKEVWKPAV

SEQ ID NO: 9426 - protein, 979 aa, synthetic construct
QEIKRINKIRRRLVKDSNTKKAGKTRGPMKTLLVRVMTPDLRERLENLRKKPENIPQPISNTSRANLNKLLTDYTEMKKAILHVYWEEFQKDPVGLMSRVAQPASKKIDQNKLKPEMDEKGNLTTAGFACSQCGQPLFVYKLEQVSEKGKAYTNYFGRCNVAEHEKLILLAQLKPEKDSDEAVTYSLGKFGQRALDFYSIHVTKESTHPVKPLAQIAGNRYASGPVGKALSDACMGTIASFLSKYQDIIIEHQKVVKGNQKRLESLRELAGKENLEYPSVTLPPQPHTKEGVDAYNEVIARVRMWVNLNLWQKLKLSRDDAKPLLRLKGFPSFPLVERQANEVDWWDMVCNVKKLINEKKEDGKVFWQNLAGYKRQEALRPYLSSEEDRKKGKKFARTQLGDLLLHLEKKHGEDWGKVYDEAWERIDKKVEGLSKHIKLEEERRSEDAQSKAALTDWLRAKASFVIEGLKEADKDEFCRCELKLQKWYGDLRGKPFAIEAENSILDISGFSKQYNCAFIWQKDGVKKLNLYLIINYFKGGKLRFKKIKPEAFEANRFYTVINKKSGEIVPMEVNFNFDDPNLIILPLAFGKRQGREFIWNDLLSLETGSLKLANGRVIEKTLYNRRTRQDEPALFVALTFERREVLDSSNIKPMNLIGVDRGENIPAVIALTDPEGCPLSRFKDSLGNPTHILRIGESYKEKQRTIQAKKEVEQRRAGGYSRKYASKAKNLADDMVRNTARDLLYYAVTQDAMLIFENLSRGFGRQGKRTFMAERQYTRMEDWLTAKLAYEGLPSKTYLSKTLAQYTSKTCSNCGFTITSADYDRVLEKLKKTATGWMTTINGKELKVEGQITYYNRYKRQNVVKDLSVELDRLSEESVNNDISSWTKGRSGEALSLLKKRFSHRPVQEKFVCLNCGFETHADEQAALNIARSWLFLRSQEYKKYQTNKTTGNTDKRAFVETWQSFYRKKLKEVWKPAV

SEQ ID NO: 9427 - protein, 979 aa, synthetic construct
QEIKRINKIRRRLVKDSNTKKAGKTRGPMKTLLVRVMTPDLRERLENLRKKPENIPQPISNTSRANLNKLLTDYTEMKKAILHVYWEEFQKDPVGLMSRVAQPASKKIDQNKLKPEMDEKGNLTTAGFACSQCGQPLFVYKLEQVSEKGKAYTNYFGRCNVAEHEKLILLAQLKPEKDSDEAVTYSLGKFGQRALDFYSIHVTKESTHPVKPLAQIAGNRYASGPVGKALSDACMGTIASFLSKYQDIIIEHQKVVKGNQKRLESLRELAGKENLEYPSVTLPPQPHTKEGVDAYNEVIARVRMWVNLNLWQKLKLSRDDAKPLLRLKGFPSFPLVERQANEVDWWDMVCNVKKLINEKKEDGKVFWQNLAGYKRQEALRPYLSSEEDRKKGKKFARYQLGDLLLHLEKKHGEDWGKVYDEAWERIDKKVEGLSKHIKLEEERRSEDAQSKAALTDWLRAKASFVIEGLKEADKDEFCRCELKLQKWYGDLRGKPFAIEAENSILDISGFSKQYNCAFIWQKDGVKKLNLYLIINYFKGGKLRFKKIKPEAFEANRFYTVINKKSGEIVPMEVNFNFDDPNLIILPLAFGKRQGREFIWNDLLSLETGSLKLANGRVIEKTLYNRRTRQDEPALFVALTFERREVLDSSNIKPMNLIGVDRGENIPAVIALTDPEGCPLSRFKDSLGNPTHILRIGESYKEKQRTIQAKKEVEQRRAGGYSRKYASKAKNLADDMVRNTARDLLYYAVTQDAMLIFENLSRGFGRQGKRTFMAERQYTRMEDWLTAKLAYEGLPSKTYLSKTLAQYTSKTCSNCGFTITSADYDRMLEKLKKTATGWMTTINGKELKVEGQITYYNRYKRQNVVKDLSVELDRLSEESVNNDISSWTKGRSGEALSLLKKRFSHRPVQEKFVCLNCGFETHADEQAALNIARSWLFLRSQEYKKYQTNKTTGNTDKRAFVETWQSFYRKKLKEVWKPAV

SEQ ID NO: 9428 - protein, 979 aa, synthetic construct
QEIKRINKIRRRLVKDSNTKKAGKTRGPMKTLLVRVMTPDLRERLENLRKKPENIPQPISNTSRANLNKLLTDYTEMKKAILHVYWEEFQKDPVGLMSRVAQPASKKIDQNKLKPEMDEKGNLTTAGFACSQCGQPLFVYKLEQVSEKGKAYTNYFGRCNVAEHEKLILLAQLKPEKDSDEAVTYSLGKFGQRALDFYSIHVTKESTHPVKPLAQIAGNRYASGPVGKALSDACMGTIASFLSKYQDIIIEHQKVVKGNQKRLESLRELAGKENLEYPSVTLPPQPHTKEGVDAYNEVIARVRMWVNLNLWQKLKLSRDDAKPLLRLKGFPSFPLVERQANEVDWWDMVCNVKKLINEKKEDGKVFWQNLAGYKRQEALRPYLSSEEDRKKGKKFARYQLGDLLLHLEKKHGEDWGKVYDEAWERIDKKVEGLSKHIKLEEERRSEDAQSKAALTDWLRAKASFVIEGLKEADKDEFCRCELKLQKWYGDLRGKPFAIEAENSILDISGFSKQYNCAFIWQKDGVKKLNLYLIINYFKGGKLRFKKIKPEAFEANRFYTVINKKSGEIVPMEVNFNFDDPNLIILPLAFGKRQGREFIWNDLLSLETGSLKLANGRVIEKTLYNRRTRQDEPALFVALTFERREVLDSSNIKPMNLIGVDRGENIPAVIALTDPEGCPLSRFKDSLGNPTHILRIGESYKEKQRTIQAKKEVEQRRAGGYSRKYASKAKNLADDMVRNTARDLLYYAVTQDAMLIFENLSRGFGRQGKRTFMAERQYTRMEDWLTAKLAYEGLPSKTYLSKTLAQYTSKTCSNCGFTITSADYDRVLEKLKKTATGWMTTINGKELKVEGQITYYNRYKRQNVVKDLSVELDRLSEESVNNDISSWDKGRSGEALSLLKKRFSHRPVQEKFVCLNCGFETHADEQAALNIARSWLFLRSQEYKKYQTNKTTGNTDKRAFVETWQSFYRKKLKEVWKPAV

SEQ ID NO: 9429 - protein, 979 aa, synthetic construct
QEIKRINKIRRRLVKDSNTKKAGKTRGPMKTLLVRVMTPDLRERLENLRKKPENIPQPISNTSRANLNKLLTDYTEMKKAILHVYWEEFQKDPVGLMSRVAQPASKKIDQNKLKPEMDEKGNLTTAGFACSQCGQPLFVYKLEQVSEKGKAYTNYFGRCNVAEHEKLILLAQLKPEKDSDEAVTYSLGKFGQRALDFYSIHVTKESTHPVKPLAQIAGNRYASGPVGKALSDACMGTIASFLSKYQDIIIEHQKVVKGNQKRLESLRELAGKENLEYPSVTLPPQPHTKEGVDAYNEVIARVRMWVNLNLWQKLKLSRDDAKPLLRLKGFPSFPLVERQANEVDWWDMVCNVKKLINEKKEDGKVFWQNLAGYKRQEALRPYLSSEEDRKKGKKFARYQLGDLLLHLEKKHGEDWGKVYDEAWERIDKKVEGLSKHIKLEEERRSEDAQSKAALTDWLRAKASFVIEGLKEADKDEFCRCELKLQKWYGDLRGKPFAIEAENSILDISGFSKQYNCAFIWQKDGVKKLNLYLIINYFKGGKLRFKKIKPEAFEANRFYTVINKKSGEIVPMEVNFNFDDPNLIILPLAFGKRQGREFIWNDLLSLETGSLKLANGRVIEKTLYNRRTRQDEPALFVALTFERREVLDSSNIKPMNLIGVDRGENIPAVIALTDPEGCPLSRFKDSLGNPTHILRIGESYKEKQRTIQAKKEVEQRRAGGYSRKYASKAKNLADDMVRNTARDLLYYAVTQDAMLIFENLSRGFGRQGKRTFMAERQYTRMEDWLTAKLAYEGLPSKTYLSKTLAQYTSKTCSNCGFTITSADYDRVLEKLKKTATGWMTTINGKELKVEGQITYYNRYKRQNVVKDLSVELDRLSEESVNNDISSWTKGRQGEALSLLKKRFSHRPVQEKFVCLNCGFETHADEQAALNIARSWLFLRSQEYKKYQTNKTTGNTDKRAFVETWQSFYRKKLKEVWKPAV

SEQ ID NO: 9430 - protein, 978 aa, synthetic construct
QEIKRINKIRRRLVKDSNTKKAGKTGPMKTLLVPVMTPDLRERLENLRKKPENIPQPISNTSQANLNKLLTDYTEMKKAILHVYWEEFQKDPVGLMSRVAQPASKKIDQNKLKPEMDEKGNLTTAGFACSQCGQPLFVYKLEQVSEKGKAYTNYFGRCNVAEHEKLILLAQLKPEKDSDEAVTYSLGKFGQRALDFYSIHVTKESTHPVKPLAQIAGNRYASGPVGKALSDACMGTIASFLSKYQDIIIEHQKVVKGNQKRLESLRELAGKENLEYPSVTLPPQPHTKEGVDAYNEVIARVRMWVNLNLWQKLKLSRDDAKPLLRLKGFPSFPLVERQANEVDWWDMVCNVKKLINEKKEDGKVFWQNLAGYKRQEALRPYLSSEEDRKKGKKFARYQLGDLLLHLEKKHGEDWGKVYDEAWERIDKKVEGLSKHIKLEEERRSEDAQSKAALTDWLRAKASFVIEGLKEADKDEFCRCELKLQKWYGDLRGKPFAIEAENSILDISGFSKQYNCAFIWQKDGVKKLNLYLIINYFKGGKLRFKKIKPEAFEANRFYTVINKKSGEIVPMEVNFNFDDPNLIILPLAFGKRQGREFIWNDLLSLETGSLKLANGRVIEKTLYNRRTRQDEPALFVALTFERREVLDSSNIKPMNLIGVDRGENIPAVIALTDPEGCPLSRFKDSLGNPTHILRIGESYKEKQRTIQAKKEVEQRRAGGYSRKYASKAKNLADDMVRNTARDLLYYAVTQDAMLIFENLSRGFGRQGKRTFMAERQYTRMEDWLTAKLAYEGLPSKTYLSKTLAQYTSKTCSNCGFTITSADYDRVLEKLKKTATGWMTTINGKELKVEGQITYYNRYKRQNVVKDLSVELDRLSEESVNNDISSWTKGRSGEALSLLKKRFSHRPVQEKFVCLNCGFETHADEQAALNIARSWLFLRSQEYKKYQTNKTTGNTDKRAFVETWQSFYRKKLKEVWKPAV

SEQ ID NO: 9431 - protein, 978 aa, synthetic construct
QEIKRINKIRRRLVKDSNTKKAGKTGPMKTLLVPVMTPDLRERLENLRKKPENIPQPISNTSRANLNKLLTDYTEMKKAILHVYWEEFQKDPVGLMSRVAQPASKKIDQNKLKPEMDEKGNLTTAGFACSQCGQPLFVYKLEQVSEKGKAYTNYFGRCNVAEHEKLIKLAQLKPEKDSDEAVTYSLGKFGQRALDFYSIHVTKESTHPVKPLAQIAGNRYASGPVGKALSDACMGTIASFLSKYQDIIIEHQKVVKGNQKRLESLRELAGKENLEYPSVTLPPQPHTKEGVDAYNEVIARVRMWVNLNLWQKLKLSRDDAKPLLRLKGFPSFPLVERQANEVDWWDMVCNVKKLINEKKEDGKVFWQNLAGYKRQEALRPYLSSEEDRKKGKKFARYQLGDLLLHLEKKHGEDWGKVYDEAWERIDKKVEGLSKHIKLEEERRSEDAQSKAALTDWLRAKASFVIEGLKEADKDEFCRCELKLQKWYGDLRGKPFAIEAENSILDISGFSKQYNCAFIWQKDGVKKLNLYLIINYFKGGKLRFKKIKPEAFEANRFYTVINKKSGEIVPMEVNFNFDDPNLIILPLAFGKRQGREFIWNDLLSLETGSLKLANGRVIEKTLYNRRTRQDEPALFVALTFERREVLDSSNIKPMNLIGVDRGENIPAVIALTDPEGCPLSRFKDSLGNPTHILRIGESYKEKQRTIQAKKEVEQRRAGGYSRKYASKAKNLADDMVRNTARDLLYYAVTQDAMLIFENLSRGFGRQGKRTFMAERQYTRMEDWLTAKLAYEGLPSKTYLSKTLAQYTSKTCSNCGFTITSADYDRVLEKLKKTATGWMTTINGKELKVEGQITYYNRYKRQNVVKDLSVELDRLSEESVNNDISSWTKGRSGEALSLLKKRFSHRPVQEKFVCLNCGFETHADEQAALNIARSWLFLRSQEYKKYQTNKTTGNTDKRAFVETWQSFYRKKLKEVWKPAV

SEQ ID NO: 9432 - protein, 978 aa, synthetic construct
QEIKRINKIRRRLVKDSNTKKAGKTGPMKTLLVPVMTPDLRERLENLRKKPENIPQPISNTSRANLNKLLTDYTEMKKAILHVYWEEFQKDPVGLMSRVAQPASKKIDQNKLKPEMDEKGNLTTAGFACSQCGQPLFVYKLEQVSEKGKAYTNYFGRCNVAEHEKLIQLAQLKPEKDSDEAVTYSLGKFGQRALDFYSIHVTKESTHPVKPLAQIAGNRYASGPVGKALSDACMGTIASFLSKYQDIIIEHQKVVKGNQKRLESLRELAGKENLEYPSVTLPPQPHTKEGVDAYNEVIARVRMWVNLNLWQKLKLSRDDAKPLLRLKGFPSFPLVERQANEVDWWDMVCNVKKLINEKKEDGKVFWQNLAGYKRQEALRPYLSSEEDRKKGKKFARYQLGDLLLHLEKKHGEDWGKVYDEAWERIDKKVEGLSKHIKLEEERRSEDAQSKAALTDWLRAKASFVIEGLKEADKDEFCRCELKLQKWYGDLRGKPFAIEAENSILDISGFSKQYNCAFIWQKDGVKKLNLYLIINYFKGGKLRFKKIKPEAFEANRFYTVINKKSGEIVPMEVNFNFDDPNLIILPLAFGKRQGREFIWNDLLSLETGSLKLANGRVIEKTLYNRRTRQDEPALFVALTFERREVLDSSNIKPMNLIGVDRGENIPAVIALTDPEGCPLSRFKDSLGNPTHILRIGESYKEKQRTIQAKKEVEQRRAGGYSRKYASKAKNLADDMVRNTARDLLYYAVTQDAMLIFENLSRGFGRQGKRTFMAERQYTRMEDWLTAKLAYEGLPSKTYLSKTLAQYTSKTCSNCGFTITSADYDRVLEKLKKTATGWMTTINGKELKVEGQITYYNRYKRQNVVKDLSVELDRLSEESVNNDISSWTKGRSGEALSLLKKRFSHRPVQEKFVCLNCGFETHADEQAALNIARSWLFLRSQEYKKYQTNKTTGNTDKRAFVETWQSFYRKKLKEVWKPAV

SEQ ID NO: 9433 - protein, 978 aa, synthetic construct
QEIKRINKIRRRLVKDSNTKKAGKTGPMKTLLVPVMTPDLRERLENLRKKPENIPQPISNTSRANLNKLLTDYTEMKKAILHVYWEEFQKDPVGLMSRVAQPASKKIDQNKLKPEMDEKGNLTTAGFACSQCGQPLFVYKLEQVSEKGKAYTNYFGRCNVAEHEKLILLDQLKPEKDSDEAVTYSLGKFGQRALDFYSIHVTKESTHPVKPLAQIAGNRYASGPVGKALSDACMGTIASFLSKYQDIIIEHQKVVKGNQKRLESLRELAGKENLEYPSVTLPPQPHTKEGVDAYNEVIARVRMWVNLNLWQKLKLSRDDAKPLLRLKGFPSFPLVERQANEVDWWDMVCNVKKLINEKKEDGKVFWQNLAGYKRQEALRPYLSSEEDRKKGKKFARYQLGDLLLHLEKKHGEDWGKVYDEAWERIDKKVEGLSKHIKLEEERRSEDAQSKAALTDWLRAKASFVIEGLKEADKDEFCRCELKLQKWYGDLRGKPFAIEAENSILDISGFSKQYNCAFIWQKDGVKKLNLYLIINYFKGGKLRFKKIKPEAFEANRFYTVINKKSGEIVPMEVNFNFDDPNLIILPLAFGKRQGREFIWNDLLSLETGSLKLANGRVIEKTLYNRRTRQDEPALFVALTFERREVLDSSNIKPMNLIGVDRGENIPAVIALTDPEGCPLSRFKDSLGNPTHILRIGESYKEKQRTIQAKKEVEQRRAGGYSRKYASKAKNLADDMVRNTARDLLYYAVTQDAMLIFENLSRGFGRQGKRTFMAERQYTRMEDWLTAKLAYEGLPSKTYLSKTLAQYTSKTCSNCGFTITSADYDRVLEKLKKTATGWMTTINGKELKVEGQITYYNRYKRQNVVKDLSVELDRLSEESVNNDISSWTKGRSGEALSLLKKRFSHRPVQEKFVCLNCGFETHADEQAALNIARSWLFLRSQEYKKYQTNKTTGNTDKRAFVETWQSFYRKKLKEVWKPAV

SEQ ID NO: 9434 - protein, 978 aa, synthetic construct
QEIKRINKIRRRLVKDSNTKKAGKTGPMKTLLVPVMTPDLRERLENLRKKPENIPQPISNTSRANLNKLLTDYTEMKKAILHVYWEEFQKDPVGLMSRVAQPASKKIDQNKLKPEMDEKGNLTTAGFACSQCGQPLFVYKLEQVSEKGKAYTNYFGRCNVAEHEKLILLYQLKPEKDSDEAVTYSLGKFGQRALDFYSIHVTKESTHPVKPLAQIAGNRYASGPVGKALSDACMGTIASFLSKYQDIIIEHQKVVKGNQKRLESLRELAGKENLEYPSVTLPPQPHTKEGVDAYNEVIARVRMWVNLNLWQKLKLSRDDAKPLLRLKGFPSFPLVERQANEVDWWDMVCNVKKLINEKKEDGKVFWQNLAGYKRQEALRPYLSSEEDRKKGKKFARYQLGDLLLHLEKKHGEDWGKVYDEAWERIDKKVEGLSKHIKLEEERRSEDAQSKAALTDWLRAKASFVIEGLKEADKDEFCRCELKLQKWYGDLRGKPFAIEAENSILDISGFSKQYNCAFIWQKDGVKKLNLYLIINYFKGGKLRFKKIKPEAFEANRFYTVINKKSGEIVPMEVNFNFDDPNLIILPLAFGKRQGREFIWNDLLSLETGSLKLANGRVIEKTLYNRRTRQDEPALFVALTFERREVLDSSNIKPMNLIGVDRGENIPAVIALTDPEGCPLSRFKDSLGNPTHILRIGESYKEKQRTIQAKKEVEQRRAGGYSRKYASKAKNLADDMVRNTARDLLYYAVTQDAMLIFENLSRGFGRQGKRTFMAERQYTRMEDWLTAKLAYEGLPSKTYLSKTLAQYTSKTCSNCGFTITSADYDRVLEKLKKTATGWMTTINGKELKVEGQITYYNRYKRQNVVKDLSVELDRLSEESVNNDISSWTKGRSGEALSLLKKRFSHRPVQEKFVCLNCGFETHADEQAALNIARSWLFLRSQEYKKYQTNKTTGNTDKRAFVETWQSFYRKKLKEVWKPAV

SEQ ID NO: 9435 - protein, 978 aa, synthetic construct
QEIKRINKIRRRLVKDSNTKKAGKTGPMKTLLVPVMTPDLRERLENLRKKPENIPQPISNTSRANLNKLLTDYTEMKKAILHVYWEEFQKDPVGLMSRVAQPASKKIDQNKLKPEMDEKGNLTTAGFACSQCGQPLFVYKLEQVSEKGKAYTNYFGRCNVAEHEKLILLSQLKPEKDSDEAVTYSLGKFGQRALDFYSIHVTKESTHPVKPLAQIAGNRYASGPVGKALSDACMGTIASFLSKYQDIIIEHQKVVKGNQKRLESLRELAGKENLEYPSVTLPPQPHTKEGVDAYNEVIARVRMWVNLNLWQKLKLSRDDAKPLLRLKGFPSFPLVERQANEVDWWDMVCNVKKLINEKKEDGKVFWQNLAGYKRQEALRPYLSSEEDRKKGKKFARYQLGDLLLHLEKKHGEDWGKVYDEAWERIDKKVEGLSKHIKLEEERRSEDAQSKAALTDWLRAKASFVIEGLKEADKDEFCRCELKLQKWYGDLRGKPFAIEAENSILDISGFSKQYNCAFIWQKDGVKKLNLYLIINYFKGGKLRFKKIKPEAFEANRFYTVINKKSGEIVPMEVNFNFDDPNLIILPLAFGKRQGREFIWNDLLSLETGSLKLANGRVIEKTLYNRRTRQDEPALFVALTFERREVLDSSNIKPMNLIGVDRGENIPAVIALTDPEGCPLSRFKDSLGNPTHILRIGESYKEKQRTIQAKKEVEQRRAGGYSRKYASKAKNLADDMVRNTARDLLYYAVTQDAMLIFENLSRGFGRQGKRTFMAERQYTRMEDWLTAKLAYEGLPSKTYLSKTLAQYTSKTCSNCGFTITSADYDRVLEKLKKTATGWMTTINGKELKVEGQITYYNRYKRQNVVKDLSVELDRLSEESVNNDISSWTKGRSGEALSLLKKRFSHRPVQEKFVCLNCGFETHADEQAALNIARSWLFLRSQEYKKYQTNKTTGNTDKRAFVETWQSFYRKKLKEVWKPAV

SEQ ID NO: 9436 - protein, 978 aa, synthetic construct
QEIKRINKIRRRLVKDSNTKKAGKTGPMKTLLVPVMTPDLRERLENLRKKPENIPQPISNTSRANLNKLLTDYTEMKKAILHVYWEEFQKDPVGLMSRVAQPASKKIDQNKLKPEMDEKGNLTTAGFACSQCGQPLFVYKLEQVSEKGKAYTNYFGRCNVAEHEKLILLAQLKPEKDSDEAVTYSLGKFGQRALDFYSIHVTKESTHPVKPLAQIAGNRYASTPVGKALSDACMGTIASFLSKYQDIIIEHQKVVKGNQKRLESLRELAGKENLEYPSVTLPPQPHTKEGVDAYNEVIARVRMWVNLNLWQKLKLSRDDAKPLLRLKGFPSFPLVERQANEVDWWDMVCNVKKLINEKKEDGKVFWQNLAGYKRQEALRPYLSSEEDRKKGKKFARYQLGDLLLHLEKKHGEDWGKVYDEAWERIDKKVEGLSKHIKLEEERRSEDAQSKAALTDWLRAKASFVIEGLKEADKDEFCRCELKLQKWYGDLRGKPFAIEAENSILDISGFSKQYNCAFIWQKDGVKKLNLYLIINYFKGGKLRFKKIKPEAFEANRFYTVINKKSGEIVPMEVNFNFDDPNLIILPLAFGKRQGREFIWNDLLSLETGSLKLANGRVIEKTLYNRRTRQDEPALFVALTFERREVLDSSNIKPMNLIGVDRGENIPAVIALTDPEGCPLSRFKDSLGNPTHILRIGESYKEKQRTIQAKKEVEQRRAGGYSRKYASKAKNLADDMVRNTARDLLYYAVTQDAMLIFENLSRGFGRQGKRTFMAERQYTRMEDWLTAKLAYEGLPSKTYLSKTLAQYTSKTCSNCGFTITSADYDRVLEKLKKTATGWMTTINGKELKVEGQITYYNRYKRQNVVKDLSVELDRLSEESVNNDISSWTKGRSGEALSLLKKRFSHRPVQEKFVCLNCGFETHADEQAALNIARSWLFLRSQEYKKYQTNKTTGNTDKRAFVETWQSFYRKKLKEVWKPAV

SEQ ID NO: 9437 - protein, 978 aa, synthetic construct
QEIKRINKIRRRLVKDSNTKKAGKTGPMKTLLVPVMTPDLRERLENLRKKPENIPQPISNTSRANLNKLLTDYTEMKKAILHVYWEEFQKDPVGLMSRVAQPASKKIDQNKLKPEMDEKGNLTTAGFACSQCGQPLFVYKLEQVSEKGKAYTNYFGRCNVAEHEKLILLAQLKPEKDSDEAVTYSLGKFGQRALDFYSIHVTKESTHPVKPLAQIAGNRYASGPVGKALSDACMGTIASFLSKYQDIIIEHQKVVKGNQKRLESLRELAGKENLEYPSVTLPPQPHTKEGVDAYNEVIARVRTWVNLNLWQKLKLSRDDAKPLLRLKGFPSFPLVERQANEVDWWDMVCNVKKLINEKKEDGKVFWQNLAGYKRQEALRPYLSSEEDRKKGKKFARYQLGDLLLHLEKKHGEDWGKVYDEAWERIDKKVEGLSKHIKLEEERRSEDAQSKAALTDWLRAKASFVIEGLKEADKDEFCRCELKLQKWYGDLRGKPFAIEAENSILDISGFSKQYNCAFIWQKDGVKKLNLYLIINYFKGGKLRFKKIKPEAFEANRFYTVINKKSGEIVPMEVNFNFDDPNLIILPLAFGKRQGREFIWNDLLSLETGSLKLANGRVIEKTLYNRRTRQDEPALFVALTFERREVLDSSNIKPMNLIGVDRGENIPAVIALTDPEGCPLSRFKDSLGNPTHILRIGESYKEKQRTIQAKKEVEQRRAGGYSRKYASKAKNLADDMVRNTARDLLYYAVTQDAMLIFENLSRGFGRQGKRTFMAERQYTRMEDWLTAKLAYEGLPSKTYLSKTLAQYTSKTCSNCGFTITSADYDRVLEKLKKTATGWMTTINGKELKVEGQITYYNRYKRQNVVKDLSVELDRLSEESVNNDISSWTKGRSGEALSLLKKRFSHRPVQEKFVCLNCGFETHADEQAALNIARSWLFLRSQEYKKYQTNKTTGNTDKRAFVETWQSFYRKKLKEVWKPAV

SEQ ID NO: 9438 - protein, 978 aa, synthetic construct
QEIKRINKIRRRLVKDSNTKKAGKTGPMKTLLVPVMTPDLRERLENLRKKPENIPQPISNTSRANLNKLLTDYTEMKKAILHVYWEEFQKDPVGLMSRVAQPASKKIDQNKLKPEMDEKGNLTTAGFACSQCGQPLFVYKLEQVSEKGKAYTNYFGRCNVAEHEKLILLAQLKPEKDSDEAVTYSLGKFGQRALDFYSIHVTKESTHPVKPLAQIAGNRYASGPVGKALSDACMGTIASFLSKYQDIIIEHQKVVKGNQKRLESLRELAGKENLEYPSVTLPPQPHTKEGVDAYNEVIARVRMWVNLNLWQKLKLSRDDAKPLLRLKGFPSFPLVERQANEVDWWDMVCNVKKLINEKKEDGKVFWQNLAGYKRQEALRPYLSSEEDRKKGKKFARTQLGDLLLHLEKKHGEDWGKVYDEAWERIDKKVEGLSKHIKLEEERRSEDAQSKAALTDWLRAKASFVIEGLKEADKDEFCRCELKLQKWYGDLRGKPFAIEAENSILDISGFSKQYNCAFIWQKDGVKKLNLYLIINYFKGGKLRFKKIKPEAFEANRFYTVINKKSGEIVPMEVNFNFDDPNLIILPLAFGKRQGREFIWNDLLSLETGSLKLANGRVIEKTLYNRRTRQDEPALFVALTFERREVLDSSNIKPMNLIGVDRGENIPAVIALTDPEGCPLSRFKDSLGNPTHILRIGESYKEKQRTIQAKKEVEQRRAGGYSRKYASKAKNLADDMVRNTARDLLYYAVTQDAMLIFENLSRGFGRQGKRTFMAERQYTRMEDWLTAKLAYEGLPSKTYLSKTLAQYTSKTCSNCGFTITSADYDRVLEKLKKTATGWMTTINGKELKVEGQITYYNRYKRQNVVKDLSVELDRLSEESVNNDISSWTKGRSGEALSLLKKRFSHRPVQEKFVCLNCGFETHADEQAALNIARSWLFLRSQEYKKYQTNKTTGNTDKRAFVETWQSFYRKKLKEVWKPAV

SEQ ID NO: 9439 - protein, 978 aa, synthetic construct
QEIKRINKIRRRLVKDSNTKKAGKTGPMKTLLVPVMTPDLRERLENLRKKPENIPQPISNTSRANLNKLLTDYTEMKKAILHVYWEEFQKDPVGLMSRVAQPASKKIDQNKLKPEMDEKGNLTTAGFACSQCGQPLFVYKLEQVSEKGKAYTNYFGRCNVAEHEKLILLAQLKPEKDSDEAVTYSLGKFGQRALDFYSIHVTKESTHPVKPLAQIAGNRYASGPVGKALSDACMGTIASFLSKYQDIIIEHQKVVKGNQKRLESLRELAGKENLEYPSVTLPPQPHTKEGVDAYNEVIARVRMWVNLNLWQKLKLSRDDAKPLLRLKGFPSFPLVERQANEVDWWDMVCNVKKLINEKKEDGKVFWQNLAGYKRQEALRPYLSSEEDRKKGKKFARYQLGDLLLHLEKKHGEDWGKVYDEAWERIDKKVEGLSKHIKLEEERRSEDAQSKAALTDWLRAKASFVIEGLKEADKDEFCRCELKLQKWYGDLRGKPFAIEAENSILDISGFSKQYNCAFIWQKDGVKKLNLYLIINYFKGGKLRFKKIKPEAFEANRFYTVINKKSGEIVPMEVNFNFDDPNLIILPLAFGKRQGREFIWNDLLSLETGSLKLANGRVIEKTLYNRRTRQDEPALFVALTFERREVLDSSNIKPMNLIGVDRGENIPAVIALTDPEGCPLSRFKDSLGNPTHILRIGESYKEKQRTIQAKKEVEQRRAGGYSRKYASKAKNLADDMVRNTARDLLYYAVTQDAMLIFENLSRGFGRQGKRTFMAERQYTRMEDWLTAKLAYEGLPSKTYLSKTLAQYTSKTCSNCGFTITSADYDRMLEKLKKTATGWMTTINGKELKVEGQITYYNRYKRQNVVKDLSVELDRLSEESVNNDISSWTKGRSGEALSLLKKRFSHRPVQEKFVCLNCGFETHADEQAALNIARSWLFLRSQEYKKYQTNKTTGNTDKRAFVETWQSFYRKKLKEVWKPAV

SEQ ID NO: 9440 - protein, 978 aa, synthetic construct
QEIKRINKIRRRLVKDSNTKKAGKTGPMKTLLVPVMTPDLRERLENLRKKPENIPQPISNTSRANLNKLLTDYTEMKKAILHVYWEEFQKDPVGLMSRVAQPASKKIDQNKLKPEMDEKGNLTTAGFACSQCGQPLFVYKLEQVSEKGKAYTNYFGRCNVAEHEKLILLAQLKPEKDSDEAVTYSLGKFGQRALDFYSIHVTKESTHPVKPLAQIAGNRYASGPVGKALSDACMGTIASFLSKYQDIIIEHQKVVKGNQKRLESLRELAGKENLEYPSVTLPPQPHTKEGVDAYNEVIARVRMWVNLNLWQKLKLSRDDAKPLLRLKGFPSFPLVERQANEVDWWDMVCNVKKLINEKKEDGKVFWQNLAGYKRQEALRPYLSSEEDRKKGKKFARYQLGDLLLHLEKKHGEDWGKVYDEAWERIDKKVEGLSKHIKLEEERRSEDAQSKAALTDWLRAKASFVIEGLKEADKDEFCRCELKLQKWYGDLRGKPFAIEAENSILDISGFSKQYNCAFIWQKDGVKKLNLYLIINYFKGGKLRFKKIKPEAFEANRFYTVINKKSGEIVPMEVNFNFDDPNLIILPLAFGKRQGREFIWNDLLSLETGSLKLANGRVIEKTLYNRRTRQDEPALFVALTFERREVLDSSNIKPMNLIGVDRGENIPAVIALTDPEGCPLSRFKDSLGNPTHILRIGESYKEKQRTIQAKKEVEQRRAGGYSRKYASKAKNLADDMVRNTARDLLYYAVTQDAMLIFENLSRGFGRQGKRTFMAERQYTRMEDWLTAKLAYEGLPSKTYLSKTLAQYTSKTCSNCGFTITSADYDRVLEKLKKTATGWMTTINGKELKVEGQITYYNRYKRQNVVKDLSVELDRLSEESVNNDISSWDKGRSGEALSLLKKRFSHRPVQEKFVCLNCGFETHADEQAALNIARSWLFLRSQEYKKYQTNKTTGNTDKRAFVETWQSFYRKKLKEVWKPAV

SEQ ID NO: 9441 - protein, 978 aa, synthetic construct
QEIKRINKIRRRLVKDSNTKKAGKTGPMKTLLVPVMTPDLRERLENLRKKPENIPQPISNTSRANLNKLLTDYTEMKKAILHVYWEEFQKDPVGLMSRVAQPASKKIDQNKLKPEMDEKGNLTTAGFACSQCGQPLFVYKLEQVSEKGKAYTNYFGRCNVAEHEKLILLAQLKPEKDSDEAVTYSLGKFGQRALDFYSIHVTKESTHPVKPLAQIAGNRYASGPVGKALSDACMGTIASFLSKYQDIIIEHQKVVKGNQKRLESLRELAGKENLEYPSVTLPPQPHTKEGVDAYNEVIARVRMWVNLNLWQKLKLSRDDAKPLLRLKGFPSFPLVERQANEVDWWDMVCNVKKLINEKKEDGKVFWQNLAGYKRQEALRPYLSSEEDRKKGKKFARYQLGDLLLHLEKKHGEDWGKVYDEAWERIDKKVEGLSKHIKLEEERRSEDAQSKAALTDWLRAKASFVIEGLKEADKDEFCRCELKLQKWYGDLRGKPFAIEAENSILDISGFSKQYNCAFIWQKDGVKKLNLYLIINYFKGGKLRFKKIKPEAFEANRFYTVINKKSGEIVPMEVNFNFDDPNLIILPLAFGKRQGREFIWNDLLSLETGSLKLANGRVIEKTLYNRRTRQDEPALFVALTFERREVLDSSNIKPMNLIGVDRGENIPAVIALTDPEGCPLSRFKDSLGNPTHILRIGESYKEKQRTIQAKKEVEQRRAGGYSRKYASKAKNLADDMVRNTARDLLYYAVTQDAMLIFENLSRGFGRQGKRTFMAERQYTRMEDWLTAKLAYEGLPSKTYLSKTLAQYTSKTCSNCGFTITSADYDRVLEKLKKTATGWMTTINGKELKVEGQITYYNRYKRQNVVKDLSVELDRLSEESVNNDISSWTKGRQGEALSLLKKRFSHRPVQEKFVCLNCGFETHADEQAALNIARSWLFLRSQEYKKYQTNKTTGNTDKRAFVETWQSFYRKKLKEVWKPAV

SEQ ID NO: 9442 - protein, 978 aa, synthetic construct
QEIKRINKIRRRLVKDSNTKKAGKTGPMKTLLVRVMTPDLRERLENLRKKPENIPQPISNTSRANLNKLLTDYTEMKKAILHVYWEEFQKDPVGLMSRVAQPASKKIDQNKLKPEMDEKGNLTTAGFACSQCGQPLFVYKLEQVSEKGKAYTNYFGRCNVAEHEKLILLAQLKPEKDSDEAVTYSLGKFGQRALDFYSIHVTKESTHPVKPLAQIAGNRYASGPVGKALSDACMGTIASFLSKYQDIIIEHQKVVKGNQKRLESLRELAGKENLEYPSVTLPPQPHTKEGVDAYNEVIARVRMWVNLNLWQKLKLSRDDAKPLLRLKGFPSFPLVERQANEVDWWDMVCNVKKLINEKKEDGKVFWQNLAGYKRQEALRPYLSSEEDRKKGKKFARYQLGDLLLHLEKKHGEDWGKVYDEAWERIDKKVEGLSKHIKLEEERRSEDAQSKAALTDWLRAKASFVIEGLKEADKDEFCRCELKLQKWYGDLRGKPFAIEAENSILDISGFSKQYNCAFIWQKDGVKKLNLYLIINYFKGGKLRFKKIKPEAFEANRFYTVINKKSGEIVPMEVNFNFDDPNLIILPLAFGKRQGREFIWNDLLSLETGSLKLANGRVIEKTLYNRRTRQDEPALFVALTFERREVLDSSNIKPMNLIGVDRGENIPAVIALTDPEGCPLSRFKDSLGNPTHILRIGESYKEKQRTIQAKKEVEQRRAGGYSRKYASKAKNLADDMVRNTARDLLYYAVTQDAMLIFENLSRGFGRQGKRTFMAERQYTRMEDWLTAKLAYEGLPSKTYLSKTLAQYTSKTCSNCGFTITSADYDRVLEKLKKTATGWMTTINGKELKVEGQITYYNRYKRQNVVKDLSVELDRLSEESVNNDISSWDKGRQGEALSLLKKRFSHRPVQEKFVCLNCGFETHADEQAALNIARSWLFLRSQEYKKYQTNKTTGNTDKRAFVETWQSFYRKKLKEVWKPAV

SEQ ID NO: 9443 - protein, 978 aa, synthetic construct
QEIKRINKIRRRLVKDSNTKKAGKTGPMKTLLVRVMTPDLRERLENLRKKPENIPQPISNTSQANLNKLLTDYTEMKKAILHVYWEEFQKDPVGLMSRVAQPASKKIDQNKLKPEMDEKGNLTTAGFACSQCGQPLFVYKLEQVSEKGKAYTNYFGRCNVAEHEKLIKLAQLKPEKDSDEAVTYSLGKFGQRALDFYSIHVTKESTHPVKPLAQIAGNRYASGPVGKALSDACMGTIASFLSKYQDIIIEHQKVVKGNQKRLESLRELAGKENLEYPSVTLPPQPHTKEGVDAYNEVIARVRMWVNLNLWQKLKLSRDDAKPLLRLKGFPSFPLVERQANEVDWWDMVCNVKKLINEKKEDGKVFWQNLAGYKRQEALRPYLSSEEDRKKGKKFARYQLGDLLLHLEKKHGEDWGKVYDEAWERIDKKVEGLSKHIKLEEERRSEDAQSKAALTDWLRAKASFVIEGLKEADKDEFCRCELKLQKWYGDLRGKPFAIEAENSILDISGFSKQYNCAFIWQKDGVKKLNLYLIINYFKGGKLRFKKIKPEAFEANRFYTVINKKSGEIVPMEVNFNFDDPNLIILPLAFGKRQGREFIWNDLLSLETGSLKLANGRVIEKTLYNRRTRQDEPALFVALTFERREVLDSSNIKPMNLIGVDRGENIPAVIALTDPEGCPLSRFKDSLGNPTHILRIGESYKEKQRTIQAKKEVEQRRAGGYSRKYASKAKNLADDMVRNTARDLLYYAVTQDAMLIFENLSRGFGRQGKRTFMAERQYTRMEDWLTAKLAYEGLPSKTYLSKTLAQYTSKTCSNCGFTITSADYDRVLEKLKKTATGWMTTINGKELKVEGQITYYNRYKRQNVVKDLSVELDRLSEESVNNDISSWTKGRSGEALSLLKKRFSHRPVQEKFVCLNCGFETHADEQAALNIARSWLFLRSQEYKKYQTNKTTGNTDKRAFVETWQSFYRKKLKEVWKPAV

SEQ ID NO: 9444 - protein, 978 aa, synthetic construct
QEIKRINKIRRRLVKDSNTKKAGKTGPMKTLLVRVMTPDLRERLENLRKKPENIPQPISNTSQANLNKLLTDYTEMKKAILHVYWEEFQKDPVGLMSRVAQPASKKIDQNKLKPEMDEKGNLTTAGFACSQCGQPLFVYKLEQVSEKGKAYTNYFGRCNVAEHEKLIQLAQLKPEKDSDEAVTYSLGKFGQRALDFYSIHVTKESTHPVKPLAQIAGNRYASGPVGKALSDACMGTIASFLSKYQDIIIEHQKVVKGNQKRLESLRELAGKENLEYPSVTLPPQPHTKEGVDAYNEVIARVRMWVNLNLWQKLKLSRDDAKPLLRLKGFPSFPLVERQANEVDWWDMVCNVKKLINEKKEDGKVFWQNLAGYKRQEALRPYLSSEEDRKKGKKFARYQLGDLLLHLEKKHGEDWGKVYDEAWERIDKKVEGLSKHIKLEEERRSEDAQSKAALTDWLRAKASFVIEGLKEADKDEFCRCELKLQKWYGDLRGKPFAIEAENSILDISGFSKQYNCAFIWQKDGVKKLNLYLIINYFKGGKLRFKKIKPEAFEANRFYTVINKKSGEIVPMEVNFNFDDPNLIILPLAFGKRQGREFIWNDLLSLETGSLKLANGRVIEKTLYNRRTRQDEPALFVALTFERREVLDSSNIKPMNLIGVDRGENIPAVIALTDPEGCPLSRFKDSLGNPTHILRIGESYKEKQRTIQAKKEVEQRRAGGYSRKYASKAKNLADDMVRNTARDLLYYAVTQDAMLIFENLSRGFGRQGKRTFMAERQYTRMEDWLTAKLAYEGLPSKTYLSKTLAQYTSKTCSNCGFTITSADYDRVLEKLKKTATGWMTTINGKELKVEGQITYYNRYKRQNVVKDLSVELDRLSEESVNNDISSWTKGRSGEALSLLKKRFSHRPVQEKFVCLNCGFETHADEQAALNIARSWLFLRSQEYKKYQTNKTTGNTDKRAFVETWQSFYRKKLKEVWKPAV

SEQ ID NO: 9445 - protein, 978 aa, synthetic construct
QEIKRINKIRRRLVKDSNTKKAGKTGPMKTLLVRVMTPDLRERLENLRKKPENIPQPISNTSQANLNKLLTDYTEMKKAILHVYWEEFQKDPVGLMSRVAQPASKKIDQNKLKPEMDEKGNLTTAGFACSQCGQPLFVYKLEQVSEKGKAYTNYFGRCNVAEHEKLILLDQLKPEKDSDEAVTYSLGKFGQRALDFYSIHVTKESTHPVKPLAQIAGNRYASGPVGKALSDACMGTIASFLSKYQDIIIEHQKVVKGNQKRLESLRELAGKENLEYPSVTLPPQPHTKEGVDAYNEVIARVRMWVNLNLWQKLKLSRDDAKPLLRLKGFPSFPLVERQANEVDWWDMVCNVKKLINEKKEDGKVFWQNLAGYKRQEALRPYLSSEEDRKKGKKFARYQLGDLLLHLEKKHGEDWGKVYDEAWERIDKKVEGLSKHIKLEEERRSEDAQSKAALTDWLRAKASFVIEGLKEADKDEFCRCELKLQKWYGDLRGKPFAIEAENSILDISGFSKQYNCAFIWQKDGVKKLNLYLIINYFKGGKLRFKKIKPEAFEANRFYTVINKKSGEIVPMEVNFNFDDPNLIILPLAFGKRQGREFIWNDLLSLETGSLKLANGRVIEKTLYNRRTRQDEPALFVALTFERREVLDSSNIKPMNLIGVDRGENIPAVIALTDPEGCPLSRFKDSLGNPTHILRIGESYKEKQRTIQAKKEVEQRRAGGYSRKYASKAKNLADDMVRNTARDLLYYAVTQDAMLIFENLSRGFGRQGKRTFMAERQYTRMEDWLTAKLAYEGLPSKTYLSKTLAQYTSKTCSNCGFTITSADYDRVLEKLKKTATGWMTTINGKELKVEGQITYYNRYKRQNVVKDLSVELDRLSEESVNNDISSWTKGRSGEALSLLKKRFSHRPVQEKFVCLNCGFETHADEQAALNIARSWLFLRSQEYKKYQTNKTTGNTDKRAFVETWQSFYRKKLKEVWKPAV

SEQ ID NO: 9446 - protein, 978 aa, synthetic construct
QEIKRINKIRRRLVKDSNTKKAGKTGPMKTLLVRVMTPDLRERLENLRKKPENIPQPISNTSQANLNKLLTDYTEMKKAILHVYWEEFQKDPVGLMSRVAQPASKKIDQNKLKPEMDEKGNLTTAGFACSQCGQPLFVYKLEQVSEKGKAYTNYFGRCNVAEHEKLILLYQLKPEKDSDEAVTYSLGKFGQRALDFYSIHVTKESTHPVKPLAQIAGNRYASGPVGKALSDACMGTIASFLSKYQDIIIEHQKVVKGNQKRLESLRELAGKENLEYPSVTLPPQPHTKEGVDAYNEVIARVRMWVNLNLWQKLKLSRDDAKPLLRLKGFPSFPLVERQANEVDWWDMVCNVKKLINEKKEDGKVFWQNLAGYKRQEALRPYLSSEEDRKKGKKFARYQLGDLLLHLEKKHGEDWGKVYDEAWERIDKKVEGLSKHIKLEEERRSEDAQSKAALTDWLRAKASFVIEGLKEADKDEFCRCELKLQKWYGDLRGKPFAIEAENSILDISGFSKQYNCAFIWQKDGVKKLNLYLIINYFKGGKLRFKKIKPEAFEANRFYTVINKKSGEIVPMEVNFNFDDPNLIILPLAFGKRQGREFIWNDLLSLETGSLKLANGRVIEKTLYNRRTRQDEPALFVALTFERREVLDSSNIKPMNLIGVDRGENIPAVIALTDPEGCPLSRFKDSLGNPTHILRIGESYKEKQRTIQAKKEVEQRRAGGYSRKYASKAKNLADDMVRNTARDLLYYAVTQDAMLIFENLSRGFGRQGKRTFMAERQYTRMEDWLTAKLAYEGLPSKTYLSKTLAQYTSKTCSNCGFTITSADYDRVLEKLKKTATGWMTTINGKELKVEGQITYYNRYKRQNVVKDLSVELDRLSEESVNNDISSWTKGRSGEALSLLKKRFSHRPVQEKFVCLNCGFETHADEQAALNIARSWLFLRSQEYKKYQTNKTTGNTDKRAFVETWQSFYRKKLKEVWKPAV

SEQ ID NO: 9447 - protein, 978 aa, synthetic construct
QEIKRINKIRRRLVKDSNTKKAGKTGPMKTLLVRVMTPDLRERLENLRKKPENIPQPISNTSQANLNKLLTDYTEMKKAILHVYWEEFQKDPVGLMSRVAQPASKKIDQNKLKPEMDEKGNLTTAGFACSQCGQPLFVYKLEQVSEKGKAYTNYFGRCNVAEHEKLILLSQLKPEKDSDEAVTYSLGKFGQRALDFYSIHVTKESTHPVKPLAQIAGNRYASGPVGKALSDACMGTIASFLSKYQDIIIEHQKVVKGNQKRLESLRELAGKENLEYPSVTLPPQPHTKEGVDAYNEVIARVRMWVNLNLWQKLKLSRDDAKPLLRLKGFPSFPLVERQANEVDWWDMVCNVKKLINEKKEDGKVFWQNLAGYKRQEALRPYLSSEEDRKKGKKFARYQLGDLLLHLEKKHGEDWGKVYDEAWERIDKKVEGLSKHIKLEEERRSEDAQSKAALTDWLRAKASFVIEGLKEADKDEFCRCELKLQKWYGDLRGKPFAIEAENSILDISGFSKQYNCAFIWQKDGVKKLNLYLIINYFKGGKLRFKKIKPEAFEANRFYTVINKKSGEIVPMEVNFNFDDPNLIILPLAFGKRQGREFIWNDLLSLETGSLKLANGRVIEKTLYNRRTRQDEPALFVALTFERREVLDSSNIKPMNLIGVDRGENIPAVIALTDPEGCPLSRFKDSLGNPTHILRIGESYKEKQRTIQAKKEVEQRRAGGYSRKYASKAKNLADDMVRNTARDLLYYAVTQDAMLIFENLSRGFGRQGKRTFMAERQYTRMEDWLTAKLAYEGLPSKTYLSKTLAQYTSKTCSNCGFTITSADYDRVLEKLKKTATGWMTTINGKELKVEGQITYYNRYKRQNVVKDLSVELDRLSEESVNNDISSWTKGRSGEALSLLKKRFSHRPVQEKFVCLNCGFETHADEQAALNIARSWLFLRSQEYKKYQTNKTTGNTDKRAFVETWQSFYRKKLKEVWKPAV

SEQ ID NO: 9448 - protein, 978 aa, synthetic construct
QEIKRINKIRRRLVKDSNTKKAGKTGPMKTLLVRVMTPDLRERLENLRKKPENIPQPISNTSQANLNKLLTDYTEMKKAILHVYWEEFQKDPVGLMSRVAQPASKKIDQNKLKPEMDEKGNLTTAGFACSQCGQPLFVYKLEQVSEKGKAYTNYFGRCNVAEHEKLILLAQLKPEKDSDEAVTYSLGKFGQRALDFYSIHVTKESTHPVKPLAQIAGNRYASTPVGKALSDACMGTIASFLSKYQDIIIEHQKVVKGNQKRLESLRELAGKENLEYPSVTLPPQPHTKEGVDAYNEVIARVRMWVNLNLWQKLKLSRDDAKPLLRLKGFPSFPLVERQANEVDWWDMVCNVKKLINEKKEDGKVFWQNLAGYKRQEALRPYLSSEEDRKKGKKFARYQLGDLLLHLEKKHGEDWGKVYDEAWERIDKKVEGLSKHIKLEEERRSEDAQSKAALTDWLRAKASFVIEGLKEADKDEFCRCELKLQKWYGDLRGKPFAIEAENSILDISGFSKQYNCAFIWQKDGVKKLNLYLIINYFKGGKLRFKKIKPEAFEANRFYTVINKKSGEIVPMEVNFNFDDPNLIILPLAFGKRQGREFIWNDLLSLETGSLKLANGRVIEKTLYNRRTRQDEPALFVALTFERREVLDSSNIKPMNLIGVDRGENIPAVIALTDPEGCPLSRFKDSLGNPTHILRIGESYKEKQRTIQAKKEVEQRRAGGYSRKYASKAKNLADDMVRNTARDLLYYAVTQDAMLIFENLSRGFGRQGKRTFMAERQYTRMEDWLTAKLAYEGLPSKTYLSKTLAQYTSKTCSNCGFTITSADYDRVLEKLKKTATGWMTTINGKELKVEGQITYYNRYKRQNVVKDLSVELDRLSEESVNNDISSWTKGRSGEALSLLKKRFSHRPVQEKFVCLNCGFETHADEQAALNIARSWLFLRSQEYKKYQTNKTTGNTDKRAFVETWQSFYRKKLKEVWKPAV

SEQ ID NO: 9449 - protein, 978 aa, synthetic construct
QEIKRINKIRRRLVKDSNTKKAGKTGPMKTLLVRVMTPDLRERLENLRKKPENIPQPISNTSQANLNKLLTDYTEMKKAILHVYWEEFQKDPVGLMSRVAQPASKKIDQNKLKPEMDEKGNLTTAGFACSQCGQPLFVYKLEQVSEKGKAYTNYFGRCNVAEHEKLILLAQLKPEKDSDEAVTYSLGKFGQRALDFYSIHVTKESTHPVKPLAQIAGNRYASGPVGKALSDACMGTIASFLSKYQDIIIEHQKVVKGNQKRLESLRELAGKENLEYPSVTLPPQPHTKEGVDAYNEVIARVRTWVNLNLWQKLKLSRDDAKPLLRLKGFPSFPLVERQANEVDWWDMVCNVKKLINEKKEDGKVFWQNLAGYKRQEALRPYLSSEEDRKKGKKFARYQLGDLLLHLEKKHGEDWGKVYDEAWERIDKKVEGLSKHIKLEEERRSEDAQSKAALTDWLRAKASFVIEGLKEADKDEFCRCELKLQKWYGDLRGKPFAIEAENSILDISGFSKQYNCAFIWQKDGVKKLNLYLIINYFKGGKLRFKKIKPEAFEANRFYTVINKKSGEIVPMEVNFNFDDPNLIILPLAFGKRQGREFIWNDLLSLETGSLKLANGRVIEKTLYNRRTRQDEPALFVALTFERREVLDSSNIKPMNLIGVDRGENIPAVIALTDPEGCPLSRFKDSLGNPTHILRIGESYKEKQRTIQAKKEVEQRRAGGYSRKYASKAKNLADDMVRNTARDLLYYAVTQDAMLIFENLSRGFGRQGKRTFMAERQYTRMEDWLTAKLAYEGLPSKTYLSKTLAQYTSKTCSNCGFTITSADYDRVLEKLKKTATGWMTTINGKELKVEGQITYYNRYKRQNVVKDLSVELDRLSEESVNNDISSWTKGRSGEALSLLKKRFSHRPVQEKFVCLNCGFETHADEQAALNIARSWLFLRSQEYKKYQTNKTTGNTDKRAFVETWQSFYRKKLKEVWKPAV

SEQ ID NO: 9450 - protein, 978 aa, synthetic construct
QEIKRINKIRRRLVKDSNTKKAGKTGPMKTLLVRVMTPDLRERLENLRKKPENIPQPISNTSQANLNKLLTDYTEMKKAILHVYWEEFQKDPVGLMSRVAQPASKKIDQNKLKPEMDEKGNLTTAGFACSQCGQPLFVYKLEQVSEKGKAYTNYFGRCNVAEHEKLILLAQLKPEKDSDEAVTYSLGKFGQRALDFYSIHVTKESTHPVKPLAQIAGNRYASGPVGKALSDACMGTIASFLSKYQDIIIEHQKVVKGNQKRLESLRELAGKENLEYPSVTLPPQPHTKEGVDAYNEVIARVRMWVNLNLWQKLKLSRDDAKPLLRLKGFPSFPLVERQANEVDWWDMVCNVKKLINEKKEDGKVFWQNLAGYKRQEALRPYLSSEEDRKKGKKFARTQLGDLLLHLEKKHGEDWGKVYDEAWERIDKKVEGLSKHIKLEEERRSEDAQSKAALTDWLRAKASFVIEGLKEADKDEFCRCELKLQKWYGDLRGKPFAIEAENSILDISGFSKQYNCAFIWQKDGVKKLNLYLIINYFKGGKLRFKKIKPEAFEANRFYTVINKKSGEIVPMEVNFNFDDPNLIILPLAFGKRQGREFIWNDLLSLETGSLKLANGRVIEKTLYNRRTRQDEPALFVALTFERREVLDSSNIKPMNLIGVDRGENIPAVIALTDPEGCPLSRFKDSLGNPTHILRIGESYKEKQRTIQAKKEVEQRRAGGYSRKYASKAKNLADDMVRNTARDLLYYAVTQDAMLIFENLSRGFGRQGKRTFMAERQYTRMEDWLTAKLAYEGLPSKTYLSKTLAQYTSKTCSNCGFTITSADYDRVLEKLKKTATGWMTTINGKELKVEGQITYYNRYKRQNVVKDLSVELDRLSEESVNNDISSWTKGRSGEALSLLKKRFSHRPVQEKFVCLNCGFETHADEQAALNIARSWLFLRSQEYKKYQTNKTTGNTDKRAFVETWQSFYRKKLKEVWKPAV

SEQ ID NO: 9451 - protein, 978 aa, synthetic construct
QEIKRINKIRRRLVKDSNTKKAGKTGPMKTLLVRVMTPDLRERLENLRKKPENIPQPISNTSQANLNKLLTDYTEMKKAILHVYWEEFQKDPVGLMSRVAQPASKKIDQNKLKPEMDEKGNLTTAGFACSQCGQPLFVYKLEQVSEKGKAYTNYFGRCNVAEHEKLILLAQLKPEKDSDEAVTYSLGKFGQRALDFYSIHVTKESTHPVKPLAQIAGNRYASGPVGKALSDACMGTIASFLSKYQDIIIEHQKVVKGNQKRLESLRELAGKENLEYPSVTLPPQPHTKEGVDAYNEVIARVRMWVNLNLWQKLKLSRDDAKPLLRLKGFPSFPLVERQANEVDWWDMVCNVKKLINEKKEDGKVFWQNLAGYKRQEALRPYLSSEEDRKKGKKFARYQLGDLLLHLEKKHGEDWGKVYDEAWERIDKKVEGLSKHIKLEEERRSEDAQSKAALTDWLRAKASFVIEGLKEADKDEFCRCELKLQKWYGDLRGKPFAIEAENSILDISGFSKQYNCAFIWQKDGVKKLNLYLIINYFKGGKLRFKKIKPEAFEANRFYTVINKKSGEIVPMEVNFNFDDPNLIILPLAFGKRQGREFIWNDLLSLETGSLKLANGRVIEKTLYNRRTRQDEPALFVALTFERREVLDSSNIKPMNLIGVDRGENIPAVIALTDPEGCPLSRFKDSLGNPTHILRIGESYKEKQRTIQAKKEVEQRRAGGYSRKYASKAKNLADDMVRNTARDLLYYAVTQDAMLIFENLSRGFGRQGKRTFMAERQYTRMEDWLTAKLAYEGLPSKTYLSKTLAQYTSKTCSNCGFTITSADYDRMLEKLKKTATGWMTTINGKELKVEGQITYYNRYKRQNVVKDLSVELDRLSEESVNNDISSWTKGRSGEALSLLKKRFSHRPVQEKFVCLNCGFETHADEQAALNIARSWLFLRSQEYKKYQTNKTTGNTDKRAFVETWQSFYRKKLKEVWKPAV

SEQ ID NO: 9452 - protein, 978 aa, synthetic construct
QEIKRINKIRRRLVKDSNTKKAGKTGPMKTLLVRVMTPDLRERLENLRKKPENIPQPISNTSQANLNKLLTDYTEMKKAILHVYWEEFQKDPVGLMSRVAQPASKKIDQNKLKPEMDEKGNLTTAGFACSQCGQPLFVYKLEQVSEKGKAYTNYFGRCNVAEHEKLILLAQLKPEKDSDEAVTYSLGKFGQRALDFYSIHVTKESTHPVKPLAQIAGNRYASGPVGKALSDACMGTIASFLSKYQDIIIEHQKVVKGNQKRLESLRELAGKENLEYPSVTLPPQPHTKEGVDAYNEVIARVRMWVNLNLWQKLKLSRDDAKPLLRLKGFPSFPLVERQANEVDWWDMVCNVKKLINEKKEDGKVFWQNLAGYKRQEALRPYLSSEEDRKKGKKFARYQLGDLLLHLEKKHGEDWGKVYDEAWERIDKKVEGLSKHIKLEEERRSEDAQSKAALTDWLRAKASFVIEGLKEADKDEFCRCELKLQKWYGDLRGKPFAIEAENSILDISGFSKQYNCAFIWQKDGVKKLNLYLIINYFKGGKLRFKKIKPEAFEANRFYTVINKKSGEIVPMEVNFNFDDPNLIILPLAFGKRQGREFIWNDLLSLETGSLKLANGRVIEKTLYNRRTRQDEPALFVALTFERREVLDSSNIKPMNLIGVDRGENIPAVIALTDPEGCPLSRFKDSLGNPTHILRIGESYKEKQRTIQAKKEVEQRRAGGYSRKYASKAKNLADDMVRNTARDLLYYAVTQDAMLIFENLSRGFGRQGKRTFMAERQYTRMEDWLTAKLAYEGLPSKTYLSKTLAQYTSKTCSNCGFTITSADYDRVLEKLKKTATGWMTTINGKELKVEGQITYYNRYKRQNVVKDLSVELDRLSEESVNNDISSWDKGRSGEALSLLKKRFSHRPVQEKFVCLNCGFETHADEQAALNIARSWLFLRSQEYKKYQTNKTTGNTDKRAFVETWQSFYRKKLKEVWKPAV

SEQ ID NO: 9453 - protein, 978 aa, synthetic construct
QEIKRINKIRRRLVKDSNTKKAGKTGPMKTLLVRVMTPDLRERLENLRKKPENIPQPISNTSQANLNKLLTDYTEMKKAILHVYWEEFQKDPVGLMSRVAQPASKKIDQNKLKPEMDEKGNLTTAGFACSQCGQPLFVYKLEQVSEKGKAYTNYFGRCNVAEHEKLILLAQLKPEKDSDEAVTYSLGKFGQRALDFYSIHVTKESTHPVKPLAQIAGNRYASGPVGKALSDACMGTIASFLSKYQDIIIEHQKVVKGNQKRLESLRELAGKENLEYPSVTLPPQPHTKEGVDAYNEVIARVRMWVNLNLWQKLKLSRDDAKPLLRLKGFPSFPLVERQANEVDWWDMVCNVKKLINEKKEDGKVFWQNLAGYKRQEALRPYLSSEEDRKKGKKFARYQLGDLLLHLEKKHGEDWGKVYDEAWERIDKKVEGLSKHIKLEEERRSEDAQSKAALTDWLRAKASFVIEGLKEADKDEFCRCELKLQKWYGDLRGKPFAIEAENSILDISGFSKQYNCAFIWQKDGVKKLNLYLIINYFKGGKLRFKKIKPEAFEANRFYTVINKKSGEIVPMEVNFNFDDPNLIILPLAFGKRQGREFIWNDLLSLETGSLKLANGRVIEKTLYNRRTRQDEPALFVALTFERREVLDSSNIKPMNLIGVDRGENIPAVIALTDPEGCPLSRFKDSLGNPTHILRIGESYKEKQRTIQAKKEVEQRRAGGYSRKYASKAKNLADDMVRNTARDLLYYAVTQDAMLIFENLSRGFGRQGKRTFMAERQYTRMEDWLTAKLAYEGLPSKTYLSKTLAQYTSKTCSNCGFTITSADYDRVLEKLKKTATGWMTTINGKELKVEGQITYYNRYKRQNVVKDLSVELDRLSEESVNNDISSWTKGRQGEALSLLKKRFSHRPVQEKFVCLNCGFETHADEQAALNIARSWLFLRSQEYKKYQTNKTTGNTDKRAFVETWQSFYRKKLKEVWKPAV

SEQ ID NO: 9454 - protein, 978 aa, synthetic construct
QEIKRINKIRRRLVKDSNTKKAGKTGPMKTLLVRVMTPDLRERLENLRKKPENIPQPISNTSRANLNKLLTDYTEMKKAILHVYWEEFQKDPVGLMSRVAQPASKKIDQNKLKPEMDEKGNLTTAGFACSQCGQPLFVYKLEQVSEKGKAYTNYFGRCNVAEHEKLIKLDQLKPEKDSDEAVTYSLGKFGQRALDFYSIHVTKESTHPVKPLAQIAGNRYASGPVGKALSDACMGTIASFLSKYQDIIIEHQKVVKGNQKRLESLRELAGKENLEYPSVTLPPQPHTKEGVDAYNEVIARVRMWVNLNLWQKLKLSRDDAKPLLRLKGFPSFPLVERQANEVDWWDMVCNVKKLINEKKEDGKVFWQNLAGYKRQEALRPYLSSEEDRKKGKKFARYQLGDLLLHLEKKHGEDWGKVYDEAWERIDKKVEGLSKHIKLEEERRSEDAQSKAALTDWLRAKASFVIEGLKEADKDEFCRCELKLQKWYGDLRGKPFAIEAENSILDISGFSKQYNCAFIWQKDGVKKLNLYLIINYFKGGKLRFKKIKPEAFEANRFYTVINKKSGEIVPMEVNFNFDDPNLIILPLAFGKRQGREFIWNDLLSLETGSLKLANGRVIEKTLYNRRTRQDEPALFVALTFERREVLDSSNIKPMNLIGVDRGENIPAVIALTDPEGCPLSRFKDSLGNPTHILRIGESYKEKQRTIQAKKEVEQRRAGGYSRKYASKAKNLADDMVRNTARDLLYYAVTQDAMLIFENLSRGFGRQGKRTFMAERQYTRMEDWLTAKLAYEGLPSKTYLSKTLAQYTSKTCSNCGFTITSADYDRVLEKLKKTATGWMTTINGKELKVEGQITYYNRYKRQNVVKDLSVELDRLSEESVNNDISSWTKGRSGEALSLLKKRFSHRPVQEKFVCLNCGFETHADEQAALNIARSWLFLRSQEYKKYQTNKTTGNTDKRAFVETWQSFYRKKLKEVWKPAV

SEQ ID NO: 9455 - protein, 978 aa, synthetic construct
QEIKRINKIRRRLVKDSNTKKAGKTGPMKTLLVRVMTPDLRERLENLRKKPENIPQPISNTSRANLNKLLTDYTEMKKAILHVYWEEFQKDPVGLMSRVAQPASKKIDQNKLKPEMDEKGNLTTAGFACSQCGQPLFVYKLEQVSEKGKAYTNYFGRCNVAEHEKLIKLYQLKPEKDSDEAVTYSLGKFGQRALDFYSIHVTKESTHPVKPLAQIAGNRYASGPVGKALSDACMGTIASFLSKYQDIIIEHQKVVKGNQKRLESLRELAGKENLEYPSVTLPPQPHTKEGVDAYNEVIARVRMWVNLNLWQKLKLSRDDAKPLLRLKGFPSFPLVERQANEVDWWDMVCNVKKLINEKKEDGKVFWQNLAGYKRQEALRPYLSSEEDRKKGKKFARYQLGDLLLHLEKKHGEDWGKVYDEAWERIDKKVEGLSKHIKLEEERRSEDAQSKAALTDWLRAKASFVIEGLKEADKDEFCRCELKLQKWYGDLRGKPFAIEAENSILDISGFSKQYNCAFIWQKDGVKKLNLYLIINYFKGGKLRFKKIKPEAFEANRFYTVINKKSGEIVPMEVNFNFDDPNLIILPLAFGKRQGREFIWNDLLSLETGSLKLANGRVIEKTLYNRRTRQDEPALFVALTFERREVLDSSNIKPMNLIGVDRGENIPAVIALTDPEGCPLSRFKDSLGNPTHILRIGESYKEKQRTIQAKKEVEQRRAGGYSRKYASKAKNLADDMVRNTARDLLYYAVTQDAMLIFENLSRGFGRQGKRTFMAERQYTRMEDWLTAKLAYEGLPSKTYLSKTLAQYTSKTCSNCGFTITSADYDRVLEKLKKTATGWMTTINGKELKVEGQITYYNRYKRQNVVKDLSVELDRLSEESVNNDISSWTKGRSGEALSLLKKRFSHRPVQEKFVCLNCGFETHADEQAALNIARSWLFLRSQEYKKYQTNKTTGNTDKRAFVETWQSFYRKKLKEVWKPAV

SEQ ID NO: 9456 - protein, 978 aa, synthetic construct
QEIKRINKIRRRLVKDSNTKKAGKTGPMKTLLVRVMTPDLRERLENLRKKPENIPQPISNTSRANLNKLLTDYTEMKKAILHVYWEEFQKDPVGLMSRVAQPASKKIDQNKLKPEMDEKGNLTTAGFACSQCGQPLFVYKLEQVSEKGKAYTNYFGRCNVAEHEKLIKLSQLKPEKDSDEAVTYSLGKFGQRALDFYSIHVTKESTHPVKPLAQIAGNRYASGPVGKALSDACMGTIASFLSKYQDIIIEHQKVVKGNQKRLESLRELAGKENLEYPSVTLPPQPHTKEGVDAYNEVIARVRMWVNLNLWQKLKLSRDDAKPLLRLKGFPSFPLVERQANEVDWWDMVCNVKKLINEKKEDGKVFWQNLAGYKRQEALRPYLSSEEDRKKGKKFARYQLGDLLLHLEKKHGEDWGKVYDEAWERIDKKVEGLSKHIKLEEERRSEDAQSKAALTDWLRAKASFVIEGLKEADKDEFCRCELKLQKWYGDLRGKPFAIEAENSILDISGFSKQYNCAFIWQKDGVKKLNLYLIINYFKGGKLRFKKIKPEAFEANRFYTVINKKSGEIVPMEVNFNFDDPNLIILPLAFGKRQGREFIWNDLLSLETGSLKLANGRVIEKTLYNRRTRQDEPALFVALTFERREVLDSSNIKPMNLIGVDRGENIPAVIALTDPEGCPLSRFKDSLGNPTHILRIGESYKEKQRTIQAKKEVEQRRAGGYSRKYASKAKNLADDMVRNTARDLLYYAVTQDAMLIFENLSRGFGRQGKRTFMAERQYTRMEDWLTAKLAYEGLPSKTYLSKTLAQYTSKTCSNCGFTITSADYDRVLEKLKKTATGWMTTINGKELKVEGQITYYNRYKRQNVVKDLSVELDRLSEESVNNDISSWTKGRSGEALSLLKKRFSHRPVQEKFVCLNCGFETHADEQAALNIARSWLFLRSQEYKKYQTNKTTGNTDKRAFVETWQSFYRKKLKEVWKPAV

SEQ ID NO: 9457 - protein, 978 aa, synthetic construct
QEIKRINKIRRRLVKDSNTKKAGKTGPMKTLLVRVMTPDLRERLENLRKKPENIPQPISNTSRANLNKLLTDYTEMKKAILHVYWEEFQKDPVGLMSRVAQPASKKIDQNKLKPEMDEKGNLTTAGFACSQCGQPLFVYKLEQVSEKGKAYTNYFGRCNVAEHEKLIKLAQLKPEKDSDEAVTYSLGKFGQRALDFYSIHVTKESTHPVKPLAQIAGNRYASTPVGKALSDACMGTIASFLSKYQDIIIEHQKVVKGNQKRLESLRELAGKENLEYPSVTLPPQPHTKEGVDAYNEVIARVRMWVNLNLWQKLKLSRDDAKPLLRLKGFPSFPLVERQANEVDWWDMVCNVKKLINEKKEDGKVFWQNLAGYKRQEALRPYLSSEEDRKKGKKFARYQLGDLLLHLEKKHGEDWGKVYDEAWERIDKKVEGLSKHIKLEEERRSEDAQSKAALTDWLRAKASFVIEGLKEADKDEFCRCELKLQKWYGDLRGKPFAIEAENSILDISGFSKQYNCAFIWQKDGVKKLNLYLIINYFKGGKLRFKKIKPEAFEANRFYTVINKKSGEIVPMEVNFNFDDPNLIILPLAFGKRQGREFIWNDLLSLETGSLKLANGRVIEKTLYNRRTRQDEPALFVALTFERREVLDSSNIKPMNLIGVDRGENIPAVIALTDPEGCPLSRFKDSLGNPTHILRIGESYKEKQRTIQAKKEVEQRRAGGYSRKYASKAKNLADDMVRNTARDLLYYAVTQDAMLIFENLSRGFGRQGKRTFMAERQYTRMEDWLTAKLAYEGLPSKTYLSKTLAQYTSKTCSNCGFTITSADYDRVLEKLKKTATGWMTTINGKELKVEGQITYYNRYKRQNVVKDLSVELDRLSEESVNNDISSWTKGRSGEALSLLKKRFSHRPVQEKFVCLNCGFETHADEQAALNIARSWLFLRSQEYKKYQTNKTTGNTDKRAFVETWQSFYRKKLKEVWKPAV

SEQ ID NO: 9458 - protein, 978 aa, synthetic construct
QEIKRINKIRRRLVKDSNTKKAGKTGPMKTLLVRVMTPDLRERLENLRKKPENIPQPISNTSRANLNKLLTDYTEMKKAILHVYWEEFQKDPVGLMSRVAQPASKKIDQNKLKPEMDEKGNLTTAGFACSQCGQPLFVYKLEQVSEKGKAYTNYFGRCNVAEHEKLIKLAQLKPEKDSDEAVTYSLGKFGQRALDFYSIHVTKESTHPVKPLAQIAGNRYASGPVGKALSDACMGTIASFLSKYQDIIIEHQKVVKGNQKRLESLRELAGKENLEYPSVTLPPQPHTKEGVDAYNEVIARVRTWVNLNLWQKLKLSRDDAKPLLRLKGFPSFPLVERQANEVDWWDMVCNVKKLINEKKEDGKVFWQNLAGYKRQEALRPYLSSEEDRKKGKKFARYQLGDLLLHLEKKHGEDWGKVYDEAWERIDKKVEGLSKHIKLEEERRSEDAQSKAALTDWLRAKASFVIEGLKEADKDEFCRCELKLQKWYGDLRGKPFAIEAENSILDISGFSKQYNCAFIWQKDGVKKLNLYLIINYFKGGKLRFKKIKPEAFEANRFYTVINKKSGEIVPMEVNFNFDDPNLIILPLAFGKRQGREFIWNDLLSLETGSLKLANGRVIEKTLYNRRTRQDEPALFVALTFERREVLDSSNIKPMNLIGVDRGENIPAVIALTDPEGCPLSRFKDSLGNPTHILRIGESYKEKQRTIQAKKEVEQRRAGGYSRKYASKAKNLADDMVRNTARDLLYYAVTQDAMLIFENLSRGFGRQGKRTFMAERQYTRMEDWLTAKLAYEGLPSKTYLSKTLAQYTSKTCSNCGFTITSADYDRVLEKLKKTATGWMTTINGKELKVEGQITYYNRYKRQNVVKDLSVELDRLSEESVNNDISSWTKGRSGEALSLLKKRFSHRPVQEKFVCLNCGFETHADEQAALNIARSWLFLRSQEYKKYQTNKTTGNTDKRAFVETWQSFYRKKLKEVWKPAV

SEQ ID NO: 9459 - protein, 978 aa, synthetic construct
QEIKRINKIRRRLVKDSNTKKAGKTGPMKTLLVRVMTPDLRERLENLRKKPENIPQPISNTSRANLNKLLTDYTEMKKAILHVYWEEFQKDPVGLMSRVAQPASKKIDQNKLKPEMDEKGNLTTAGFACSQCGQPLFVYKLEQVSEKGKAYTNYFGRCNVAEHEKLIKLAQLKPEKDSDEAVTYSLGKFGQRALDFYSIHVTKESTHPVKPLAQIAGNRYASGPVGKALSDACMGTIASFLSKYQDIIIEHQKVVKGNQKRLESLRELAGKENLEYPSVTLPPQPHTKEGVDAYNEVIARVRMWVNLNLWQKLKLSRDDAKPLLRLKGFPSFPLVERQANEVDWWDMVCNVKKLINEKKEDGKVFWQNLAGYKRQEALRPYLSSEEDRKKGKKFARTQLGDLLLHLEKKHGEDWGKVYDEAWERIDKKVEGLSKHIKLEEERRSEDAQSKAALTDWLRAKASFVIEGLKEADKDEFCRCELKLQKWYGDLRGKPFAIEAENSILDISGFSKQYNCAFIWQKDGVKKLNLYLIINYFKGGKLRFKKIKPEAFEANRFYTVINKKSGEIVPMEVNFNFDDPNLIILPLAFGKRQGREFIWNDLLSLETGSLKLANGRVIEKTLYNRRTRQDEPALFVALTFERREVLDSSNIKPMNLIGVDRGENIPAVIALTDPEGCPLSRFKDSLGNPTHILRIGESYKEKQRTIQAKKEVEQRRAGGYSRKYASKAKNLADDMVRNTARDLLYYAVTQDAMLIFENLSRGFGRQGKRTFMAERQYTRMEDWLTAKLAYEGLPSKTYLSKTLAQYTSKTCSNCGFTITSADYDRVLEKLKKTATGWMTTINGKELKVEGQITYYNRYKRQNVVKDLSVELDRLSEESVNNDISSWTKGRSGEALSLLKKRFSHRPVQEKFVCLNCGFETHADEQAALNIARSWLFLRSQEYKKYQTNKTTGNTDKRAFVETWQSFYRKKLKEVWKPAV

SEQ ID NO: 9460 - protein, 978 aa, synthetic construct
QEIKRINKIRRRLVKDSNTKKAGKTGPMKTLLVRVMTPDLRERLENLRKKPENIPQPISNTSRANLNKLLTDYTEMKKAILHVYWEEFQKDPVGLMSRVAQPASKKIDQNKLKPEMDEKGNLTTAGFACSQCGQPLFVYKLEQVSEKGKAYTNYFGRCNVAEHEKLIKLAQLKPEKDSDEAVTYSLGKFGQRALDFYSIHVTKESTHPVKPLAQIAGNRYASGPVGKALSDACMGTIASFLSKYQDIIIEHQKVVKGNQKRLESLRELAGKENLEYPSVTLPPQPHTKEGVDAYNEVIARVRMWVNLNLWQKLKLSRDDAKPLLRLKGFPSFPLVERQANEVDWWDMVCNVKKLINEKKEDGKVFWQNLAGYKRQEALRPYLSSEEDRKKGKKFARYQLGDLLLHLEKKHGEDWGKVYDEAWERIDKKVEGLSKHIKLEEERRSEDAQSKAALTDWLRAKASFVIEGLKEADKDEFCRCELKLQKWYGDLRGKPFAIEAENSILDISGFSKQYNCAFIWQKDGVKKLNLYLIINYFKGGKLRFKKIKPEAFEANRFYTVINKKSGEIVPMEVNFNFDDPNLIILPLAFGKRQGREFIWNDLLSLETGSLKLANGRVIEKTLYNRRTRQDEPALFVALTFERREVLDSSNIKPMNLIGVDRGENIPAVIALTDPEGCPLSRFKDSLGNPTHILRIGESYKEKQRTIQAKKEVEQRRAGGYSRKYASKAKNLADDMVRNTARDLLYYAVTQDAMLIFENLSRGFGRQGKRTFMAERQYTRMEDWLTAKLAYEGLPSKTYLSKTLAQYTSKTCSNCGFTITSADYDRMLEKLKKTATGWMTTINGKELKVEGQITYYNRYKRQNVVKDLSVELDRLSEESVNNDISSWTKGRSGEALSLLKKRFSHRPVQEKFVCLNCGFETHADEQAALNIARSWLFLRSQEYKKYQTNKTTGNTDKRAFVETWQSFYRKKLKEVWKPAV

SEQ ID NO: 9461 - protein, 978 aa, synthetic construct
QEIKRINKIRRRLVKDSNTKKAGKTGPMKTLLVRVMTPDLRERLENLRKKPENIPQPISNTSRANLNKLLTDYTEMKKAILHVYWEEFQKDPVGLMSRVAQPASKKIDQNKLKPEMDEKGNLTTAGFACSQCGQPLFVYKLEQVSEKGKAYTNYFGRCNVAEHEKLIKLAQLKPEKDSDEAVTYSLGKFGQRALDFYSIHVTKESTHPVKPLAQIAGNRYASGPVGKALSDACMGTIASFLSKYQDIIIEHQKVVKGNQKRLESLRELAGKENLEYPSVTLPPQPHTKEGVDAYNEVIARVRMWVNLNLWQKLKLSRDDAKPLLRLKGFPSFPLVERQANEVDWWDMVCNVKKLINEKKEDGKVFWQNLAGYKRQEALRPYLSSEEDRKKGKKFARYQLGDLLLHLEKKHGEDWGKVYDEAWERIDKKVEGLSKHIKLEEERRSEDAQSKAALTDWLRAKASFVIEGLKEADKDEFCRCELKLQKWYGDLRGKPFAIEAENSILDISGFSKQYNCAFIWQKDGVKKLNLYLIINYFKGGKLRFKKIKPEAFEANRFYTVINKKSGEIVPMEVNFNFDDPNLIILPLAFGKRQGREFIWNDLLSLETGSLKLANGRVIEKTLYNRRTRQDEPALFVALTFERREVLDSSNIKPMNLIGVDRGENIPAVIALTDPEGCPLSRFKDSLGNPTHILRIGESYKEKQRTIQAKKEVEQRRAGGYSRKYASKAKNLADDMVRNTARDLLYYAVTQDAMLIFENLSRGFGRQGKRTFMAERQYTRMEDWLTAKLAYEGLPSKTYLSKTLAQYTSKTCSNCGFTITSADYDRVLEKLKKTATGWMTTINGKELKVEGQITYYNRYKRQNVVKDLSVELDRLSEESVNNDISSWDKGRSGEALSLLKKRFSHRPVQEKFVCLNCGFETHADEQAALNIARSWLFLRSQEYKKYQTNKTTGNTDKRAFVETWQSFYRKKLKEVWKPAV

SEQ ID NO: 9462 - protein, 978 aa, synthetic construct
QEIKRINKIRRRLVKDSNTKKAGKTGPMKTLLVRVMTPDLRERLENLRKKPENIPQPISNTSRANLNKLLTDYTEMKKAILHVYWEEFQKDPVGLMSRVAQPASKKIDQNKLKPEMDEKGNLTTAGFACSQCGQPLFVYKLEQVSEKGKAYTNYFGRCNVAEHEKLIKLAQLKPEKDSDEAVTYSLGKFGQRALDFYSIHVTKESTHPVKPLAQIAGNRYASGPVGKALSDACMGTIASFLSKYQDIIIEHQKVVKGNQKRLESLRELAGKENLEYPSVTLPPQPHTKEGVDAYNEVIARVRMWVNLNLWQKLKLSRDDAKPLLRLKGFPSFPLVERQANEVDWWDMVCNVKKLINEKKEDGKVFWQNLAGYKRQEALRPYLSSEEDRKKGKKFARYQLGDLLLHLEKKHGEDWGKVYDEAWERIDKKVEGLSKHIKLEEERRSEDAQSKAALTDWLRAKASFVIEGLKEADKDEFCRCELKLQKWYGDLRGKPFAIEAENSILDISGFSKQYNCAFIWQKDGVKKLNLYLIINYFKGGKLRFKKIKPEAFEANRFYTVINKKSGEIVPMEVNFNFDDPNLIILPLAFGKRQGREFIWNDLLSLETGSLKLANGRVIEKTLYNRRTRQDEPALFVALTFERREVLDSSNIKPMNLIGVDRGENIPAVIALTDPEGCPLSRFKDSLGNPTHILRIGESYKEKQRTIQAKKEVEQRRAGGYSRKYASKAKNLADDMVRNTARDLLYYAVTQDAMLIFENLSRGFGRQGKRTFMAERQYTRMEDWLTAKLAYEGLPSKTYLSKTLAQYTSKTCSNCGFTITSADYDRVLEKLKKTATGWMTTINGKELKVEGQITYYNRYKRQNVVKDLSVELDRLSEESVNNDISSWTKGRQGEALSLLKKRFSHRPVQEKFVCLNCGFETHADEQAALNIARSWLFLRSQEYKKYQTNKTTGNTDKRAFVETWQSFYRKKLKEVWKPAV

SEQ ID NO: 9463 - protein, 978 aa, synthetic construct
QEIKRINKIRRRLVKDSNTKKAGKTGPMKTLLVRVMTPDLRERLENLRKKPENIPQPISNTSRANLNKLLTDYTEMKKAILHVYWEEFQKDPVGLMSRVAQPASKKIDQNKLKPEMDEKGNLTTAGFACSQCGQPLFVYKLEQVSEKGKAYTNYFGRCNVAEHEKLIQLDQLKPEKDSDEAVTYSLGKFGQRALDFYSIHVTKESTHPVKPLAQIAGNRYASGPVGKALSDACMGTIASFLSKYQDIIIEHQKVVKGNQKRLESLRELAGKENLEYPSVTLPPQPHTKEGVDAYNEVIARVRMWVNLNLWQKLKLSRDDAKPLLRLKGFPSFPLVERQANEVDWWDMVCNVKKLINEKKEDGKVFWQNLAGYKRQEALRPYLSSEEDRKKGKKFARYQLGDLLLHLEKKHGEDWGKVYDEAWERIDKKVEGLSKHIKLEEERRSEDAQSKAALTDWLRAKASFVIEGLKEADKDEFCRCELKLQKWYGDLRGKPFAIEAENSILDISGFSKQYNCAFIWQKDGVKKLNLYLIINYFKGGKLRFKKIKPEAFEANRFYTVINKKSGEIVPMEVNFNFDDPNLIILPLAFGKRQGREFIWNDLLSLETGSLKLANGRVIEKTLYNRRTRQDEPALFVALTFERREVLDSSNIKPMNLIGVDRGENIPAVIALTDPEGCPLSRFKDSLGNPTHILRIGESYKEKQRTIQAKKEVEQRRAGGYSRKYASKAKNLADDMVRNTARDLLYYAVTQDAMLIFENLSRGFGRQGKRTFMAERQYTRMEDWLTAKLAYEGLPSKTYLSKTLAQYTSKTCSNCGFTITSADYDRVLEKLKKTATGWMTTINGKELKVEGQITYYNRYKRQNVVKDLSVELDRLSEESVNNDISSWTKGRSGEALSLLKKRFSHRPVQEKFVCLNCGFETHADEQAALNIARSWLFLRSQEYKKYQTNKTTGNTDKRAFVETWQSFYRKKLKEVWKPAV

SEQ ID NO: 9464 - protein, 978 aa, synthetic construct
QEIKRINKIRRRLVKDSNTKKAGKTGPMKTLLVRVMTPDLRERLENLRKKPENIPQPISNTSRANLNKLLTDYTEMKKAILHVYWEEFQKDPVGLMSRVAQPASKKIDQNKLKPEMDEKGNLTTAGFACSQCGQPLFVYKLEQVSEKGKAYTNYFGRCNVAEHEKLIQLYQLKPEKDSDEAVTYSLGKFGQRALDFYSIHVTKESTHPVKPLAQIAGNRYASGPVGKALSDACMGTIASFLSKYQDIIIEHQKVVKGNQKRLESLRELAGKENLEYPSVTLPPQPHTKEGVDAYNEVIARVRMWVNLNLWQKLKLSRDDAKPLLRLKGFPSFPLVERQANEVDWWDMVCNVKKLINEKKEDGKVFWQNLAGYKRQEALRPYLSSEEDRKKGKKFARYQLGDLLLHLEKKHGEDWGKVYDEAWERIDKKVEGLSKHIKLEEERRSEDAQSKAALTDWLRAKASFVIEGLKEADKDEFCRCELKLQKWYGDLRGKPFAIEAENSILDISGFSKQYNCAFIWQKDGVKKLNLYLIINYFKGGKLRFKKIKPEAFEANRFYTVINKKSGEIVPMEVNFNFDDPNLIILPLAFGKRQGREFIWNDLLSLETGSLKLANGRVIEKTLYNRRTRQDEPALFVALTFERREVLDSSNIKPMNLIGVDRGENIPAVIALTDPEGCPLSRFKDSLGNPTHILRIGESYKEKQRTIQAKKEVEQRRAGGYSRKYASKAKNLADDMVRNTARDLLYYAVTQDAMLIFENLSRGFGRQGKRTFMAERQYTRMEDWLTAKLAYEGLPSKTYLSKTLAQYTSKTCSNCGFTITSADYDRVLEKLKKTATGWMTTINGKELKVEGQITYYNRYKRQNVVKDLSVELDRLSEESVNNDISSWTKGRSGEALSLLKKRFSHRPVQEKFVCLNCGFETHADEQAALNIARSWLFLRSQEYKKYQTNKTTGNTDKRAFVETWQSFYRKKLKEVWKPAV

SEQ ID NO: 9465 - protein, 978 aa, synthetic construct
QEIKRINKIRRRLVKDSNTKKAGKTGPMKTLLVRVMTPDLRERLENLRKKPENIPQPISNTSRANLNKLLTDYTEMKKAILHVYWEEFQKDPVGLMSRVAQPASKKIDQNKLKPEMDEKGNLTTAGFACSQCGQPLFVYKLEQVSEKGKAYTNYFGRCNVAEHEKLIQLSQLKPEKDSDEAVTYSLGKFGQRALDFYSIHVTKESTHPVKPLAQIAGNRYASGPVGKALSDACMGTIASFLSKYQDIIIEHQKVVKGNQKRLESLRELAGKENLEYPSVTLPPQPHTKEGVDAYNEVIARVRMWVNLNLWQKLKLSRDDAKPLLRLKGFPSFPLVERQANEVDWWDMVCNVKKLINEKKEDGKVFWQNLAGYKRQEALRPYLSSEEDRKKGKKFARYQLGDLLLHLEKKHGEDWGKVYDEAWERIDKKVEGLSKHIKLEEERRSEDAQSKAALTDWLRAKASFVIEGLKEADKDEFCRCELKLQKWYGDLRGKPFAIEAENSILDISGFSKQYNCAFIWQKDGVKKLNLYLIINYFKGGKLRFKKIKPEAFEANRFYTVINKKSGEIVPMEVNFNFDDPNLIILPLAFGKRQGREFIWNDLLSLETGSLKLANGRVIEKTLYNRRTRQDEPALFVALTFERREVLDSSNIKPMNLIGVDRGENIPAVIALTDPEGCPLSRFKDSLGNPTHILRIGESYKEKQRTIQAKKEVEQRRAGGYSRKYASKAKNLADDMVRNTARDLLYYAVTQDAMLIFENLSRGFGRQGKRTFMAERQYTRMEDWLTAKLAYEGLPSKTYLSKTLAQYTSKTCSNCGFTITSADYDRVLEKLKKTATGWMTTINGKELKVEGQITYYNRYKRQNVVKDLSVELDRLSEESVNNDISSWTKGRSGEALSLLKKRFSHRPVQEKFVCLNCGFETHADEQAALNIARSWLFLRSQEYKKYQTNKTTGNTDKRAFVETWQSFYRKKLKEVWKPAV

SEQ ID NO: 9466 - protein, 978 aa, synthetic construct
QEIKRINKIRRRLVKDSNTKKAGKTGPMKTLLVRVMTPDLRERLENLRKKPENIPQPISNTSRANLNKLLTDYTEMKKAILHVYWEEFQKDPVGLMSRVAQPASKKIDQNKLKPEMDEKGNLTTAGFACSQCGQPLFVYKLEQVSEKGKAYTNYFGRCNVAEHEKLIQLAQLKPEKDSDEAVTYSLGKFGQRALDFYSIHVTKESTHPVKPLAQIAGNRYASTPVGKALSDACMGTIASFLSKYQDIIIEHQKVVKGNQKRLESLRELAGKENLEYPSVTLPPQPHTKEGVDAYNEVIARVRMWVNLNLWQKLKLSRDDAKPLLRLKGFPSFPLVERQANEVDWWDMVCNVKKLINEKKEDGKVFWQNLAGYKRQEALRPYLSSEEDRKKGKKFARYQLGDLLLHLEKKHGEDWGKVYDEAWERIDKKVEGLSKHIKLEEERRSEDAQSKAALTDWLRAKASFVIEGLKEADKDEFCRCELKLQKWYGDLRGKPFAIEAENSILDISGFSKQYNCAFIWQKDGVKKLNLYLIINYFKGGKLRFKKIKPEAFEANRFYTVINKKSGEIVPMEVNFNFDDPNLIILPLAFGKRQGREFIWNDLLSLETGSLKLANGRVIEKTLYNRRTRQDEPALFVALTFERREVLDSSNIKPMNLIGVDRGENIPAVIALTDPEGCPLSRFKDSLGNPTHILRIGESYKEKQRTIQAKKEVEQRRAGGYSRKYASKAKNLADDMVRNTARDLLYYAVTQDAMLIFENLSRGFGRQGKRTFMAERQYTRMEDWLTAKLAYEGLPSKTYLSKTLAQYTSKTCSNCGFTITSADYDRVLEKLKKTATGWMTTINGKELKVEGQITYYNRYKRQNVVKDLSVELDRLSEESVNNDISSWTKGRSGEALSLLKKRFSHRPVQEKFVCLNCGFETHADEQAALNIARSWLFLRSQEYKKYQTNKTTGNTDKRAFVETWQSFYRKKLKEVWKPAV

SEQ ID NO: 9467 - protein, 978 aa, synthetic construct
QEIKRINKIRRRLVKDSNTKKAGKTGPMKTLLVRVMTPDLRERLENLRKKPENIPQPISNTSRANLNKLLTDYTEMKKAILHVYWEEFQKDPVGLMSRVAQPASKKIDQNKLKPEMDEKGNLTTAGFACSQCGQPLFVYKLEQVSEKGKAYTNYFGRCNVAEHEKLIQLAQLKPEKDSDEAVTYSLGKFGQRALDFYSIHVTKESTHPVKPLAQIAGNRYASGPVGKALSDACMGTIASFLSKYQDIIIEHQKVVKGNQKRLESLRELAGKENLEYPSVTLPPQPHTKEGVDAYNEVIARVRTWVNLNLWQKLKLSRDDAKPLLRLKGFPSFPLVERQANEVDWWDMVCNVKKLINEKKEDGKVFWQNLAGYKRQEALRPYLSSEEDRKKGKKFARYQLGDLLLHLEKKHGEDWGKVYDEAWERIDKKVEGLSKHIKLEEERRSEDAQSKAALTDWLRAKASFVIEGLKEADKDEFCRCELKLQKWYGDLRGKPFAIEAENSILDISGFSKQYNCAFIWQKDGVKKLNLYLIINYFKGGKLRFKKIKPEAFEANRFYTVINKKSGEIVPMEVNFNFDDPNLIILPLAFGKRQGREFIWNDLLSLETGSLKLANGRVIEKTLYNRRTRQDEPALFVALTFERREVLDSSNIKPMNLIGVDRGENIPAVIALTDPEGCPLSRFKDSLGNPTHILRIGESYKEKQRTIQAKKEVEQRRAGGYSRKYASKAKNLADDMVRNTARDLLYYAVTQDAMLIFENLSRGFGRQGKRTFMAERQYTRMEDWLTAKLAYEGLPSKTYLSKTLAQYTSKTCSNCGFTITSADYDRVLEKLKKTATGWMTTINGKELKVEGQITYYNRYKRQNVVKDLSVELDRLSEESVNNDISSWTKGRSGEALSLLKKRFSHRPVQEKFVCLNCGFETHADEQAALNIARSWLFLRSQEYKKYQTNKTTGNTDKRAFVETWQSFYRKKLKEVWKPAV

SEQ ID NO: 9468 - protein, 978 aa, synthetic construct
QEIKRINKIRRRLVKDSNTKKAGKTGPMKTLLVRVMTPDLRERLENLRKKPENIPQPISNTSRANLNKLLTDYTEMKKAILHVYWEEFQKDPVGLMSRVAQPASKKIDQNKLKPEMDEKGNLTTAGFACSQCGQPLFVYKLEQVSEKGKAYTNYFGRCNVAEHEKLIQLAQLKPEKDSDEAVTYSLGKFGQRALDFYSIHVTKESTHPVKPLAQIAGNRYASGPVGKALSDACMGTIASFLSKYQDIIIEHQKVVKGNQKRLESLRELAGKENLEYPSVTLPPQPHTKEGVDAYNEVIARVRMWVNLNLWQKLKLSRDDAKPLLRLKGFPSFPLVERQANEVDWWDMVCNVKKLINEKKEDGKVFWQNLAGYKRQEALRPYLSSEEDRKKGKKFARTQLGDLLLHLEKKHGEDWGKVYDEAWERIDKKVEGLSKHIKLEEERRSEDAQSKAALTDWLRAKASFVIEGLKEADKDEFCRCELKLQKWYGDLRGKPFAIEAENSILDISGFSKQYNCAFIWQKDGVKKLNLYLIINYFKGGKLRFKKIKPEAFEANRFYTVINKKSGEIVPMEVNFNFDDPNLIILPLAFGKRQGREFIWNDLLSLETGSLKLANGRVIEKTLYNRRTRQDEPALFVALTFERREVLDSSNIKPMNLIGVDRGENIPAVIALTDPEGCPLSRFKDSLGNPTHILRIGESYKEKQRTIQAKKEVEQRRAGGYSRKYASKAKNLADDMVRNTARDLLYYAVTQDAMLIFENLSRGFGRQGKRTFMAERQYTRMEDWLTAKLAYEGLPSKTYLSKTLAQYTSKTCSNCGFTITSADYDRVLEKLKKTATGWMTTINGKELKVEGQITYYNRYKRQNVVKDLSVELDRLSEESVNNDISSWTKGRSGEALSLLKKRFSHRPVQEKFVCLNCGFETHADEQAALNIARSWLFLRSQEYKKYQTNKTTGNTDKRAFVETWQSFYRKKLKEVWKPAV

SEQ ID NO: 9469 - protein, 978 aa, synthetic construct
QEIKRINKIRRRLVKDSNTKKAGKTGPMKTLLVRVMTPDLRERLENLRKKPENIPQPISNTSRANLNKLLTDYTEMKKAILHVYWEEFQKDPVGLMSRVAQPASKKIDQNKLKPEMDEKGNLTTAGFACSQCGQPLFVYKLEQVSEKGKAYTNYFGRCNVAEHEKLIQLAQLKPEKDSDEAVTYSLGKFGQRALDFYSIHVTKESTHPVKPLAQIAGNRYASGPVGKALSDACMGTIASFLSKYQDIIIEHQKVVKGNQKRLESLRELAGKENLEYPSVTLPPQPHTKEGVDAYNEVIARVRMWVNLNLWQKLKLSRDDAKPLLRLKGFPSFPLVERQANEVDWWDMVCNVKKLINEKKEDGKVFWQNLAGYKRQEALRPYLSSEEDRKKGKKFARYQLGDLLLHLEKKHGEDWGKVYDEAWERIDKKVEGLSKHIKLEEERRSEDAQSKAALTDWLRAKASFVIEGLKEADKDEFCRCELKLQKWYGDLRGKPFAIEAENSILDISGFSKQYNCAFIWQKDGVKKLNLYLIINYFKGGKLRFKKIKPEAFEANRFYTVINKKSGEIVPMEVNFNFDDPNLIILPLAFGKRQGREFIWNDLLSLETGSLKLANGRVIEKTLYNRRTRQDEPALFVALTFERREVLDSSNIKPMNLIGVDRGENIPAVIALTDPEGCPLSRFKDSLGNPTHILRIGESYKEKQRTIQAKKEVEQRRAGGYSRKYASKAKNLADDMVRNTARDLLYYAVTQDAMLIFENLSRGFGRQGKRTFMAERQYTRMEDWLTAKLAYEGLPSKTYLSKTLAQYTSKTCSNCGFTITSADYDRMLEKLKKTATGWMTTINGKELKVEGQITYYNRYKRQNVVKDLSVELDRLSEESVNNDISSWTKGRSGEALSLLKKRFSHRPVQEKFVCLNCGFETHADEQAALNIARSWLFLRSQEYKKYQTNKTTGNTDKRAFVETWQSFYRKKLKEVWKPAV

SEQ ID NO: 9470 - protein, 978 aa, synthetic construct
QEIKRINKIRRRLVKDSNTKKAGKTGPMKTLLVRVMTPDLRERLENLRKKPENIPQPISNTSRANLNKLLTDYTEMKKAILHVYWEEFQKDPVGLMSRVAQPASKKIDQNKLKPEMDEKGNLTTAGFACSQCGQPLFVYKLEQVSEKGKAYTNYFGRCNVAEHEKLIQLAQLKPEKDSDEAVTYSLGKFGQRALDFYSIHVTKESTHPVKPLAQIAGNRYASGPVGKALSDACMGTIASFLSKYQDIIIEHQKVVKGNQKRLESLRELAGKENLEYPSVTLPPQPHTKEGVDAYNEVIARVRMWVNLNLWQKLKLSRDDAKPLLRLKGFPSFPLVERQANEVDWWDMVCNVKKLINEKKEDGKVFWQNLAGYKRQEALRPYLSSEEDRKKGKKFARYQLGDLLLHLEKKHGEDWGKVYDEAWERIDKKVEGLSKHIKLEEERRSEDAQSKAALTDWLRAKASFVIEGLKEADKDEFCRCELKLQKWYGDLRGKPFAIEAENSILDISGFSKQYNCAFIWQKDGVKKLNLYLIINYFKGGKLRFKKIKPEAFEANRFYTVINKKSGEIVPMEVNFNFDDPNLIILPLAFGKRQGREFIWNDLLSLETGSLKLANGRVIEKTLYNRRTRQDEPALFVALTFERREVLDSSNIKPMNLIGVDRGENIPAVIALTDPEGCPLSRFKDSLGNPTHILRIGESYKEKQRTIQAKKEVEQRRAGGYSRKYASKAKNLADDMVRNTARDLLYYAVTQDAMLIFENLSRGFGRQGKRTFMAERQYTRMEDWLTAKLAYEGLPSKTYLSKTLAQYTSKTCSNCGFTITSADYDRVLEKLKKTATGWMTTINGKELKVEGQITYYNRYKRQNVVKDLSVELDRLSEESVNNDISSWDKGRSGEALSLLKKRFSHRPVQEKFVCLNCGFETHADEQAALNIARSWLFLRSQEYKKYQTNKTTGNTDKRAFVETWQSFYRKKLKEVWKPAV

SEQ ID NO: 9471 - protein, 978 aa, synthetic construct
QEIKRINKIRRRLVKDSNTKKAGKTGPMKTLLVRVMTPDLRERLENLRKKPENIPQPISNTSRANLNKLLTDYTEMKKAILHVYWEEFQKDPVGLMSRVAQPASKKIDQNKLKPEMDEKGNLTTAGFACSQCGQPLFVYKLEQVSEKGKAYTNYFGRCNVAEHEKLIQLAQLKPEKDSDEAVTYSLGKFGQRALDFYSIHVTKESTHPVKPLAQIAGNRYASGPVGKALSDACMGTIASFLSKYQDIIIEHQKVVKGNQKRLESLRELAGKENLEYPSVTLPPQPHTKEGVDAYNEVIARVRMWVNLNLWQKLKLSRDDAKPLLRLKGFPSFPLVERQANEVDWWDMVCNVKKLINEKKEDGKVFWQNLAGYKRQEALRPYLSSEEDRKKGKKFARYQLGDLLLHLEKKHGEDWGKVYDEAWERIDKKVEGLSKHIKLEEERRSEDAQSKAALTDWLRAKASFVIEGLKEADKDEFCRCELKLQKWYGDLRGKPFAIEAENSILDISGFSKQYNCAFIWQKDGVKKLNLYLIINYFKGGKLRFKKIKPEAFEANRFYTVINKKSGEIVPMEVNFNFDDPNLIILPLAFGKRQGREFIWNDLLSLETGSLKLANGRVIEKTLYNRRTRQDEPALFVALTFERREVLDSSNIKPMNLIGVDRGENIPAVIALTDPEGCPLSRFKDSLGNPTHILRIGESYKEKQRTIQAKKEVEQRRAGGYSRKYASKAKNLADDMVRNTARDLLYYAVTQDAMLIFENLSRGFGRQGKRTFMAERQYTRMEDWLTAKLAYEGLPSKTYLSKTLAQYTSKTCSNCGFTITSADYDRVLEKLKKTATGWMTTINGKELKVEGQITYYNRYKRQNVVKDLSVELDRLSEESVNNDISSWTKGRQGEALSLLKKRFSHRPVQEKFVCLNCGFETHADEQAALNIARSWLFLRSQEYKKYQTNKTTGNTDKRAFVETWQSFYRKKLKEVWKPAV

SEQ ID NO: 9472 - protein, 978 aa, synthetic construct
QEIKRINKIRRRLVKDSNTKKAGKTGPMKTLLVRVMTPDLRERLENLRKKPENIPQPISNTSRANLNKLLTDYTEMKKAILHVYWEEFQKDPVGLMSRVAQPASKKIDQNKLKPEMDEKGNLTTAGFACSQCGQPLFVYKLEQVSEKGKAYTNYFGRCNVAEHEKLILLDQLKPEKDSDEAVTYSLGKFGQRALDFYSIHVTKESTHPVKPLAQIAGNRYASTPVGKALSDACMGTIASFLSKYQDIIIEHQKVVKGNQKRLESLRELAGKENLEYPSVTLPPQPHTKEGVDAYNEVIARVRMWVNLNLWQKLKLSRDDAKPLLRLKGFPSFPLVERQANEVDWWDMVCNVKKLINEKKEDGKVFWQNLAGYKRQEALRPYLSSEEDRKKGKKFARYQLGDLLLHLEKKHGEDWGKVYDEAWERIDKKVEGLSKHIKLEEERRSEDAQSKAALTDWLRAKASFVIEGLKEADKDEFCRCELKLQKWYGDLRGKPFAIEAENSILDISGFSKQYNCAFIWQKDGVKKLNLYLIINYFKGGKLRFKKIKPEAFEANRFYTVINKKSGEIVPMEVNFNFDDPNLIILPLAFGKRQGREFIWNDLLSLETGSLKLANGRVIEKTLYNRRTRQDEPALFVALTFERREVLDSSNIKPMNLIGVDRGENIPAVIALTDPEGCPLSRFKDSLGNPTHILRIGESYKEKQRTIQAKKEVEQRRAGGYSRKYASKAKNLADDMVRNTARDLLYYAVTQDAMLIFENLSRGFGRQGKRTFMAERQYTRMEDWLTAKLAYEGLPSKTYLSKTLAQYTSKTCSNCGFTITSADYDRVLEKLKKTATGWMTTINGKELKVEGQITYYNRYKRQNVVKDLSVELDRLSEESVNNDISSWTKGRSGEALSLLKKRFSHRPVQEKFVCLNCGFETHADEQAALNIARSWLFLRSQEYKKYQTNKTTGNTDKRAFVETWQSFYRKKLKEVWKPAV

SEQ ID NO: 9473 - protein, 978 aa, synthetic construct
QEIKRINKIRRRLVKDSNTKKAGKTGPMKTLLVRVMTPDLRERLENLRKKPENIPQPISNTSRANLNKLLTDYTEMKKAILHVYWEEFQKDPVGLMSRVAQPASKKIDQNKLKPEMDEKGNLTTAGFACSQCGQPLFVYKLEQVSEKGKAYTNYFGRCNVAEHEKLILLDQLKPEKDSDEAVTYSLGKFGQRALDFYSIHVTKESTHPVKPLAQIAGNRYASGPVGKALSDACMGTIASFLSKYQDIIIEHQKVVKGNQKRLESLRELAGKENLEYPSVTLPPQPHTKEGVDAYNEVIARVRTWVNLNLWQKLKLSRDDAKPLLRLKGFPSFPLVERQANEVDWWDMVCNVKKLINEKKEDGKVFWQNLAGYKRQEALRPYLSSEEDRKKGKKFARYQLGDLLLHLEKKHGEDWGKVYDEAWERIDKKVEGLSKHIKLEEERRSEDAQSKAALTDWLRAKASFVIEGLKEADKDEFCRCELKLQKWYGDLRGKPFAIEAENSILDISGFSKQYNCAFIWQKDGVKKLNLYLIINYFKGGKLRFKKIKPEAFEANRFYTVINKKSGEIVPMEVNFNFDDPNLIILPLAFGKRQGREFIWNDLLSLETGSLKLANGRVIEKTLYNRRTRQDEPALFVALTFERREVLDSSNIKPMNLIGVDRGENIPAVIALTDPEGCPLSRFKDSLGNPTHILRIGESYKEKQRTIQAKKEVEQRRAGGYSRKYASKAKNLADDMVRNTARDLLYYAVTQDAMLIFENLSRGFGRQGKRTFMAERQYTRMEDWLTAKLAYEGLPSKTYLSKTLAQYTSKTCSNCGFTITSADYDRVLEKLKKTATGWMTTINGKELKVEGQITYYNRYKRQNVVKDLSVELDRLSEESVNNDISSWTKGRSGEALSLLKKRFSHRPVQEKFVCLNCGFETHADEQAALNIARSWLFLRSQEYKKYQTNKTTGNTDKRAFVETWQSFYRKKLKEVWKPAV

SEQ ID NO: 9474 - protein, 978 aa, synthetic construct
QEIKRINKIRRRLVKDSNTKKAGKTGPMKTLLVRVMTPDLRERLENLRKKPENIPQPISNTSRANLNKLLTDYTEMKKAILHVYWEEFQKDPVGLMSRVAQPASKKIDQNKLKPEMDEKGNLTTAGFACSQCGQPLFVYKLEQVSEKGKAYTNYFGRCNVAEHEKLILLDQLKPEKDSDEAVTYSLGKFGQRALDFYSIHVTKESTHPVKPLAQIAGNRYASGPVGKALSDACMGTIASFLSKYQDIIIEHQKVVKGNQKRLESLRELAGKENLEYPSVTLPPQPHTKEGVDAYNEVIARVRMWVNLNLWQKLKLSRDDAKPLLRLKGFPSFPLVERQANEVDWWDMVCNVKKLINEKKEDGKVFWQNLAGYKRQEALRPYLSSEEDRKKGKKFARTQLGDLLLHLEKKHGEDWGKVYDEAWERIDKKVEGLSKHIKLEEERRSEDAQSKAALTDWLRAKASFVIEGLKEADKDEFCRCELKLQKWYGDLRGKPFAIEAENSILDISGFSKQYNCAFIWQKDGVKKLNLYLIINYFKGGKLRFKKIKPEAFEANRFYTVINKKSGEIVPMEVNFNFDDPNLIILPLAFGKRQGREFIWNDLLSLETGSLKLANGRVIEKTLYNRRTRQDEPALFVALTFERREVLDSSNIKPMNLIGVDRGENIPAVIALTDPEGCPLSRFKDSLGNPTHILRIGESYKEKQRTIQAKKEVEQRRAGGYSRKYASKAKNLADDMVRNTARDLLYYAVTQDAMLIFENLSRGFGRQGKRTFMAERQYTRMEDWLTAKLAYEGLPSKTYLSKTLAQYTSKTCSNCGFTITSADYDRVLEKLKKTATGWMTTINGKELKVEGQITYYNRYKRQNVVKDLSVELDRLSEESVNNDISSWTKGRSGEALSLLKKRFSHRPVQEKFVCLNCGFETHADEQAALNIARSWLFLRSQEYKKYQTNKTTGNTDKRAFVETWQSFYRKKLKEVWKPAV

SEQ ID NO: 9475 - protein, 978 aa, synthetic construct
QEIKRINKIRRRLVKDSNTKKAGKTGPMKTLLVRVMTPDLRERLENLRKKPENIPQPISNTSRANLNKLLTDYTEMKKAILHVYWEEFQKDPVGLMSRVAQPASKKIDQNKLKPEMDEKGNLTTAGFACSQCGQPLFVYKLEQVSEKGKAYTNYFGRCNVAEHEKLILLDQLKPEKDSDEAVTYSLGKFGQRALDFYSIHVTKESTHPVKPLAQIAGNRYASGPVGKALSDACMGTIASFLSKYQDIIIEHQKVVKGNQKRLESLRELAGKENLEYPSVTLPPQPHTKEGVDAYNEVIARVRMWVNLNLWQKLKLSRDDAKPLLRLKGFPSFPLVERQANEVDWWDMVCNVKKLINEKKEDGKVFWQNLAGYKRQEALRPYLSSEEDRKKGKKFARYQLGDLLLHLEKKHGEDWGKVYDEAWERIDKKVEGLSKHIKLEEERRSEDAQSKAALTDWLRAKASFVIEGLKEADKDEFCRCELKLQKWYGDLRGKPFAIEAENSILDISGFSKQYNCAFIWQKDGVKKLNLYLIINYFKGGKLRFKKIKPEAFEANRFYTVINKKSGEIVPMEVNFNFDDPNLIILPLAFGKRQGREFIWNDLLSLETGSLKLANGRVIEKTLYNRRTRQDEPALFVALTFERREVLDSSNIKPMNLIGVDRGENIPAVIALTDPEGCPLSRFKDSLGNPTHILRIGESYKEKQRTIQAKKEVEQRRAGGYSRKYASKAKNLADDMVRNTARDLLYYAVTQDAMLIFENLSRGFGRQGKRTFMAERQYTRMEDWLTAKLAYEGLPSKTYLSKTLAQYTSKTCSNCGFTITSADYDRMLEKLKKTATGWMTTINGKELKVEGQITYYNRYKRQNVVKDLSVELDRLSEESVNNDISSWTKGRSGEALSLLKKRFSHRPVQEKFVCLNCGFETHADEQAALNIARSWLFLRSQEYKKYQTNKTTGNTDKRAFVETWQSFYRKKLKEVWKPAV

SEQ ID NO: 9476 - protein, 978 aa, synthetic construct
QEIKRINKIRRRLVKDSNTKKAGKTGPMKTLLVRVMTPDLRERLENLRKKPENIPQPISNTSRANLNKLLTDYTEMKKAILHVYWEEFQKDPVGLMSRVAQPASKKIDQNKLKPEMDEKGNLTTAGFACSQCGQPLFVYKLEQVSEKGKAYTNYFGRCNVAEHEKLILLDQLKPEKDSDEAVTYSLGKFGQRALDFYSIHVTKESTHPVKPLAQIAGNRYASGPVGKALSDACMGTIASFLSKYQDIIIEHQKVVKGNQKRLESLRELAGKENLEYPSVTLPPQPHTKEGVDAYNEVIARVRMWVNLNLWQKLKLSRDDAKPLLRLKGFPSFPLVERQANEVDWWDMVCNVKKLINEKKEDGKVFWQNLAGYKRQEALRPYLSSEEDRKKGKKFARYQLGDLLLHLEKKHGEDWGKVYDEAWERIDKKVEGLSKHIKLEEERRSEDAQSKAALTDWLRAKASFVIEGLKEADKDEFCRCELKLQKWYGDLRGKPFAIEAENSILDISGFSKQYNCAFIWQKDGVKKLNLYLIINYFKGGKLRFKKIKPEAFEANRFYTVINKKSGEIVPMEVNFNFDDPNLIILPLAFGKRQGREFIWNDLLSLETGSLKLANGRVIEKTLYNRRTRQDEPALFVALTFERREVLDSSNIKPMNLIGVDRGENIPAVIALTDPEGCPLSRFKDSLGNPTHILRIGESYKEKQRTIQAKKEVEQRRAGGYSRKYASKAKNLADDMVRNTARDLLYYAVTQDAMLIFENLSRGFGRQGKRTFMAERQYTRMEDWLTAKLAYEGLPSKTYLSKTLAQYTSKTCSNCGFTITSADYDRVLEKLKKTATGWMTTINGKELKVEGQITYYNRYKRQNVVKDLSVELDRLSEESVNNDISSWDKGRSGEALSLLKKRFSHRPVQEKFVCLNCGFETHADEQAALNIARSWLFLRSQEYKKYQTNKTTGNTDKRAFVETWQSFYRKKLKEVWKPAV

SEQ ID NO: 9477 - protein, 978 aa, synthetic construct
QEIKRINKIRRRLVKDSNTKKAGKTGPMKTLLVRVMTPDLRERLENLRKKPENIPQPISNTSRANLNKLLTDYTEMKKAILHVYWEEFQKDPVGLMSRVAQPASKKIDQNKLKPEMDEKGNLTTAGFACSQCGQPLFVYKLEQVSEKGKAYTNYFGRCNVAEHEKLILLDQLKPEKDSDEAVTYSLGKFGQRALDFYSIHVTKESTHPVKPLAQIAGNRYASGPVGKALSDACMGTIASFLSKYQDIIIEHQKVVKGNQKRLESLRELAGKENLEYPSVTLPPQPHTKEGVDAYNEVIARVRMWVNLNLWQKLKLSRDDAKPLLRLKGFPSFPLVERQANEVDWWDMVCNVKKLINEKKEDGKVFWQNLAGYKRQEALRPYLSSEEDRKKGKKFARYQLGDLLLHLEKKHGEDWGKVYDEAWERIDKKVEGLSKHIKLEEERRSEDAQSKAALTDWLRAKASFVIEGLKEADKDEFCRCELKLQKWYGDLRGKPFAIEAENSILDISGFSKQYNCAFIWQKDGVKKLNLYLIINYFKGGKLRFKKIKPEAFEANRFYTVINKKSGEIVPMEVNFNFDDPNLIILPLAFGKRQGREFIWNDLLSLETGSLKLANGRVIEKTLYNRRTRQDEPALFVALTFERREVLDSSNIKPMNLIGVDRGENIPAVIALTDPEGCPLSRFKDSLGNPTHILRIGESYKEKQRTIQAKKEVEQRRAGGYSRKYASKAKNLADDMVRNTARDLLYYAVTQDAMLIFENLSRGFGRQGKRTFMAERQYTRMEDWLTAKLAYEGLPSKTYLSKTLAQYTSKTCSNCGFTITSADYDRVLEKLKKTATGWMTTINGKELKVEGQITYYNRYKRQNVVKDLSVELDRLSEESVNNDISSWTKGRQGEALSLLKKRFSHRPVQEKFVCLNCGFETHADEQAALNIARSWLFLRSQEYKKYQTNKTTGNTDKRAFVETWQSFYRKKLKEVWKPAV

SEQ ID NO: 9478 - protein, 978 aa, synthetic construct
QEIKRINKIRRRLVKDSNTKKAGKTGPMKTLLVRVMTPDLRERLENLRKKPENIPQPISNTSRANLNKLLTDYTEMKKAILHVYWEEFQKDPVGLMSRVAQPASKKIDQNKLKPEMDEKGNLTTAGFACSQCGQPLFVYKLEQVSEKGKAYTNYFGRCNVAEHEKLILLYQLKPEKDSDEAVTYSLGKFGQRALDFYSIHVTKESTHPVKPLAQIAGNRYASTPVGKALSDACMGTIASFLSKYQDIIIEHQKVVKGNQKRLESLRELAGKENLEYPSVTLPPQPHTKEGVDAYNEVIARVRMWVNLNLWQKLKLSRDDAKPLLRLKGFPSFPLVERQANEVDWWDMVCNVKKLINEKKEDGKVFWQNLAGYKRQEALRPYLSSEEDRKKGKKFARYQLGDLLLHLEKKHGEDWGKVYDEAWERIDKKVEGLSKHIKLEEERRSEDAQSKAALTDWLRAKASFVIEGLKEADKDEFCRCELKLQKWYGDLRGKPFAIEAENSILDISGFSKQYNCAFIWQKDGVKKLNLYLIINYFKGGKLRFKKIKPEAFEANRFYTVINKKSGEIVPMEVNFNFDDPNLIILPLAFGKRQGREFIWNDLLSLETGSLKLANGRVIEKTLYNRRTRQDEPALFVALTFERREVLDSSNIKPMNLIGVDRGENIPAVIALTDPEGCPLSRFKDSLGNPTHILRIGESYKEKQRTIQAKKEVEQRRAGGYSRKYASKAKNLADDMVRNTARDLLYYAVTQDAMLIFENLSRGFGRQGKRTFMAERQYTRMEDWLTAKLAYEGLPSKTYLSKTLAQYTSKTCSNCGFTITSADYDRVLEKLKKTATGWMTTINGKELKVEGQITYYNRYKRQNVVKDLSVELDRLSEESVNNDISSWTKGRSGEALSLLKKRFSHRPVQEKFVCLNCGFETHADEQAALNIARSWLFLRSQEYKKYQTNKTTGNTDKRAFVETWQSFYRKKLKEVWKPAV

SEQ ID NO: 9479 - protein, 978 aa, synthetic construct
QEIKRINKIRRRLVKDSNTKKAGKTGPMKTLLVRVMTPDLRERLENLRKKPENIPQPISNTSRANLNKLLTDYTEMKKAILHVYWEEFQKDPVGLMSRVAQPASKKIDQNKLKPEMDEKGNLTTAGFACSQCGQPLFVYKLEQVSEKGKAYTNYFGRCNVAEHEKLILLYQLKPEKDSDEAVTYSLGKFGQRALDFYSIHVTKESTHPVKPLAQIAGNRYASGPVGKALSDACMGTIASFLSKYQDIIIEHQKVVKGNQKRLESLRELAGKENLEYPSVTLPPQPHTKEGVDAYNEVIARVRTWVNLNLWQKLKLSRDDAKPLLRLKGFPSFPLVERQANEVDWWDMVCNVKKLINEKKEDGKVFWQNLAGYKRQEALRPYLSSEEDRKKGKKFARYQLGDLLLHLEKKHGEDWGKVYDEAWERIDKKVEGLSKHIKLEEERRSEDAQSKAALTDWLRAKASFVIEGLKEADKDEFCRCELKLQKWYGDLRGKPFAIEAENSILDISGFSKQYNCAFIWQKDGVKKLNLYLIINYFKGGKLRFKKIKPEAFEANRFYTVINKKSGEIVPMEVNFNFDDPNLIILPLAFGKRQGREFIWNDLLSLETGSLKLANGRVIEKTLYNRRTRQDEPALFVALTFERREVLDSSNIKPMNLIGVDRGENIPAVIALTDPEGCPLSRFKDSLGNPTHILRIGESYKEKQRTIQAKKEVEQRRAGGYSRKYASKAKNLADDMVRNTARDLLYYAVTQDAMLIFENLSRGFGRQGKRTFMAERQYTRMEDWLTAKLAYEGLPSKTYLSKTLAQYTSKTCSNCGFTITSADYDRVLEKLKKTATGWMTTINGKELKVEGQITYYNRYKRQNVVKDLSVELDRLSEESVNNDISSWTKGRSGEALSLLKKRFSHRPVQEKFVCLNCGFETHADEQAALNIARSWLFLRSQEYKKYQTNKTTGNTDKRAFVETWQSFYRKKLKEVWKPAV

SEQ ID NO: 9480 - protein, 978 aa, synthetic construct
QEIKRINKIRRRLVKDSNTKKAGKTGPMKTLLVRVMTPDLRERLENLRKKPENIPQPISNTSRANLNKLLTDYTEMKKAILHVYWEEFQKDPVGLMSRVAQPASKKIDQNKLKPEMDEKGNLTTAGFACSQCGQPLFVYKLEQVSEKGKAYTNYFGRCNVAEHEKLILLYQLKPEKDSDEAVTYSLGKFGQRALDFYSIHVTKESTHPVKPLAQIAGNRYASGPVGKALSDACMGTIASFLSKYQDIIIEHQKVVKGNQKRLESLRELAGKENLEYPSVTLPPQPHTKEGVDAYNEVIARVRMWVNLNLWQKLKLSRDDAKPLLRLKGFPSFPLVERQANEVDWWDMVCNVKKLINEKKEDGKVFWQNLAGYKRQEALRPYLSSEEDRKKGKKFARTQLGDLLLHLEKKHGEDWGKVYDEAWERIDKKVEGLSKHIKLEEERRSEDAQSKAALTDWLRAKASFVIEGLKEADKDEFCRCELKLQKWYGDLRGKPFAIEAENSILDISGFSKQYNCAFIWQKDGVKKLNLYLIINYFKGGKLRFKKIKPEAFEANRFYTVINKKSGEIVPMEVNFNFDDPNLIILPLAFGKRQGREFIWNDLLSLETGSLKLANGRVIEKTLYNRRTRQDEPALFVALTFERREVLDSSNIKPMNLIGVDRGENIPAVIALTDPEGCPLSRFKDSLGNPTHILRIGESYKEKQRTIQAKKEVEQRRAGGYSRKYASKAKNLADDMVRNTARDLLYYAVTQDAMLIFENLSRGFGRQGKRTFMAERQYTRMEDWLTAKLAYEGLPSKTYLSKTLAQYTSKTCSNCGFTITSADYDRVLEKLKKTATGWMTTINGKELKVEGQITYYNRYKRQNVVKDLSVELDRLSEESVNNDISSWTKGRSGEALSLLKKRFSHRPVQEKFVCLNCGFETHADEQAALNIARSWLFLRSQEYKKYQTNKTTGNTDKRAFVETWQSFYRKKLKEVWKPAV

SEQ ID NO: 9481 - protein, 978 aa, synthetic construct
QEIKRINKIRRRLVKDSNTKKAGKTGPMKTLLVRVMTPDLRERLENLRKKPENIPQPISNTSRANLNKLLTDYTEMKKAILHVYWEEFQKDPVGLMSRVAQPASKKIDQNKLKPEMDEKGNLTTAGFACSQCGQPLFVYKLEQVSEKGKAYTNYFGRCNVAEHEKLILLYQLKPEKDSDEAVTYSLGKFGQRALDFYSIHVTKESTHPVKPLAQIAGNRYASGPVGKALSDACMGTIASFLSKYQDIIIEHQKVVKGNQKRLESLRELAGKENLEYPSVTLPPQPHTKEGVDAYNEVIARVRMWVNLNLWQKLKLSRDDAKPLLRLKGFPSFPLVERQANEVDWWDMVCNVKKLINEKKEDGKVFWQNLAGYKRQEALRPYLSSEEDRKKGKKFARYQLGDLLLHLEKKHGEDWGKVYDEAWERIDKKVEGLSKHIKLEEERRSEDAQSKAALTDWLRAKASFVIEGLKEADKDEFCRCELKLQKWYGDLRGKPFAIEAENSILDISGFSKQYNCAFIWQKDGVKKLNLYLIINYFKGGKLRFKKIKPEAFEANRFYTVINKKSGEIVPMEVNFNFDDPNLIILPLAFGKRQGREFIWNDLLSLETGSLKLANGRVIEKTLYNRRTRQDEPALFVALTFERREVLDSSNIKPMNLIGVDRGENIPAVIALTDPEGCPLSRFKDSLGNPTHILRIGESYKEKQRTIQAKKEVEQRRAGGYSRKYASKAKNLADDMVRNTARDLLYYAVTQDAMLIFENLSRGFGRQGKRTFMAERQYTRMEDWLTAKLAYEGLPSKTYLSKTLAQYTSKTCSNCGFTITSADYDRMLEKLKKTATGWMTTINGKELKVEGQITYYNRYKRQNVVKDLSVELDRLSEESVNNDISSWTKGRSGEALSLLKKRFSHRPVQEKFVCLNCGFETHADEQAALNIARSWLFLRSQEYKKYQTNKTTGNTDKRAFVETWQSFYRKKLKEVWKPAV

SEQ ID NO: 9482 - protein, 978 aa, synthetic construct
QEIKRINKIRRRLVKDSNTKKAGKTGPMKTLLVRVMTPDLRERLENLRKKPENIPQPISNTSRANLNKLLTDYTEMKKAILHVYWEEFQKDPVGLMSRVAQPASKKIDQNKLKPEMDEKGNLTTAGFACSQCGQPLFVYKLEQVSEKGKAYTNYFGRCNVAEHEKLILLYQLKPEKDSDEAVTYSLGKFGQRALDFYSIHVTKESTHPVKPLAQIAGNRYASGPVGKALSDACMGTIASFLSKYQDIIIEHQKVVKGNQKRLESLRELAGKENLEYPSVTLPPQPHTKEGVDAYNEVIARVRMWVNLNLWQKLKLSRDDAKPLLRLKGFPSFPLVERQANEVDWWDMVCNVKKLINEKKEDGKVFWQNLAGYKRQEALRPYLSSEEDRKKGKKFARYQLGDLLLHLEKKHGEDWGKVYDEAWERIDKKVEGLSKHIKLEEERRSEDAQSKAALTDWLRAKASFVIEGLKEADKDEFCRCELKLQKWYGDLRGKPFAIEAENSILDISGFSKQYNCAFIWQKDGVKKLNLYLIINYFKGGKLRFKKIKPEAFEANRFYTVINKKSGEIVPMEVNFNFDDPNLIILPLAFGKRQGREFIWNDLLSLETGSLKLANGRVIEKTLYNRRTRQDEPALFVALTFERREVLDSSNIKPMNLIGVDRGENIPAVIALTDPEGCPLSRFKDSLGNPTHILRIGESYKEKQRTIQAKKEVEQRRAGGYSRKYASKAKNLADDMVRNTARDLLYYAVTQDAMLIFENLSRGFGRQGKRTFMAERQYTRMEDWLTAKLAYEGLPSKTYLSKTLAQYTSKTCSNCGFTITSADYDRVLEKLKKTATGWMTTINGKELKVEGQITYYNRYKRQNVVKDLSVELDRLSEESVNNDISSWDKGRSGEALSLLKKRFSHRPVQEKFVCLNCGFETHADEQAALNIARSWLFLRSQEYKKYQTNKTTGNTDKRAFVETWQSFYRKKLKEVWKPAV

SEQ ID NO: 9483 - protein, 978 aa, synthetic construct
QEIKRINKIRRRLVKDSNTKKAGKTGPMKTLLVRVMTPDLRERLENLRKKPENIPQPISNTSRANLNKLLTDYTEMKKAILHVYWEEFQKDPVGLMSRVAQPASKKIDQNKLKPEMDEKGNLTTAGFACSQCGQPLFVYKLEQVSEKGKAYTNYFGRCNVAEHEKLILLYQLKPEKDSDEAVTYSLGKFGQRALDFYSIHVTKESTHPVKPLAQIAGNRYASGPVGKALSDACMGTIASFLSKYQDIIIEHQKVVKGNQKRLESLRELAGKENLEYPSVTLPPQPHTKEGVDAYNEVIARVRMWVNLNLWQKLKLSRDDAKPLLRLKGFPSFPLVERQANEVDWWDMVCNVKKLINEKKEDGKVFWQNLAGYKRQEALRPYLSSEEDRKKGKKFARYQLGDLLLHLEKKHGEDWGKVYDEAWERIDKKVEGLSKHIKLEEERRSEDAQSKAALTDWLRAKASFVIEGLKEADKDEFCRCELKLQKWYGDLRGKPFAIEAENSILDISGFSKQYNCAFIWQKDGVKKLNLYLIINYFKGGKLRFKKIKPEAFEANRFYTVINKKSGEIVPMEVNFNFDDPNLIILPLAFGKRQGREFIWNDLLSLETGSLKLANGRVIEKTLYNRRTRQDEPALFVALTFERREVLDSSNIKPMNLIGVDRGENIPAVIALTDPEGCPLSRFKDSLGNPTHILRIGESYKEKQRTIQAKKEVEQRRAGGYSRKYASKAKNLADDMVRNTARDLLYYAVTQDAMLIFENLSRGFGRQGKRTFMAERQYTRMEDWLTAKLAYEGLPSKTYLSKTLAQYTSKTCSNCGFTITSADYDRVLEKLKKTATGWMTTINGKELKVEGQITYYNRYKRQNVVKDLSVELDRLSEESVNNDISSWTKGRQGEALSLLKKRFSHRPVQEKFVCLNCGFETHADEQAALNIARSWLFLRSQEYKKYQTNKTTGNTDKRAFVETWQSFYRKKLKEVWKPAV

SEQ ID NO: 9484 - protein, 978 aa, synthetic construct
QEIKRINKIRRRLVKDSNTKKAGKTGPMKTLLVRVMTPDLRERLENLRKKPENIPQPISNTSRANLNKLLTDYTEMKKAILHVYWEEFQKDPVGLMSRVAQPASKKIDQNKLKPEMDEKGNLTTAGFACSQCGQPLFVYKLEQVSEKGKAYTNYFGRCNVAEHEKLILLSQLKPEKDSDEAVTYSLGKFGQRALDFYSIHVTKESTHPVKPLAQIAGNRYASTPVGKALSDACMGTIASFLSKYQDIIIEHQKVVKGNQKRLESLRELAGKENLEYPSVTLPPQPHTKEGVDAYNEVIARVRMWVNLNLWQKLKLSRDDAKPLLRLKGFPSFPLVERQANEVDWWDMVCNVKKLINEKKEDGKVFWQNLAGYKRQEALRPYLSSEEDRKKGKKFARYQLGDLLLHLEKKHGEDWGKVYDEAWERIDKKVEGLSKHIKLEEERRSEDAQSKAALTDWLRAKASFVIEGLKEADKDEFCRCELKLQKWYGDLRGKPFAIEAENSILDISGFSKQYNCAFIWQKDGVKKLNLYLIINYFKGGKLRFKKIKPEAFEANRFYTVINKKSGEIVPMEVNFNFDDPNLIILPLAFGKRQGREFIWNDLLSLETGSLKLANGRVIEKTLYNRRTRQDEPALFVALTFERREVLDSSNIKPMNLIGVDRGENIPAVIALTDPEGCPLSRFKDSLGNPTHILRIGESYKEKQRTIQAKKEVEQRRAGGYSRKYASKAKNLADDMVRNTARDLLYYAVTQDAMLIFENLSRGFGRQGKRTFMAERQYTRMEDWLTAKLAYEGLPSKTYLSKTLAQYTSKTCSNCGFTITSADYDRVLEKLKKTATGWMTTINGKELKVEGQITYYNRYKRQNVVKDLSVELDRLSEESVNNDISSWTKGRSGEALSLLKKRFSHRPVQEKFVCLNCGFETHADEQAALNIARSWLFLRSQEYKKYQTNKTTGNTDKRAFVETWQSFYRKKLKEVWKPAV

SEQ ID NO: 9485 - protein, 978 aa, synthetic construct
QEIKRINKIRRRLVKDSNTKKAGKTGPMKTLLVRVMTPDLRERLENLRKKPENIPQPISNTSRANLNKLLTDYTEMKKAILHVYWEEFQKDPVGLMSRVAQPASKKIDQNKLKPEMDEKGNLTTAGFACSQCGQPLFVYKLEQVSEKGKAYTNYFGRCNVAEHEKLILLSQLKPEKDSDEAVTYSLGKFGQRALDFYSIHVTKESTHPVKPLAQIAGNRYASGPVGKALSDACMGTIASFLSKYQDIIIEHQKVVKGNQKRLESLRELAGKENLEYPSVTLPPQPHTKEGVDAYNEVIARVRTWVNLNLWQKLKLSRDDAKPLLRLKGFPSFPLVERQANEVDWWDMVCNVKKLINEKKEDGKVFWQNLAGYKRQEALRPYLSSEEDRKKGKKFARYQLGDLLLHLEKKHGEDWGKVYDEAWERIDKKVEGLSKHIKLEEERRSEDAQSKAALTDWLRAKASFVIEGLKEADKDEFCRCELKLQKWYGDLRGKPFAIEAENSILDISGFSKQYNCAFIWQKDGVKKLNLYLIINYFKGGKLRFKKIKPEAFEANRFYTVINKKSGEIVPMEVNFNFDDPNLIILPLAFGKRQGREFIWNDLLSLETGSLKLANGRVIEKTLYNRRTRQDEPALFVALTFERREVLDSSNIKPMNLIGVDRGENIPAVIALTDPEGCPLSRFKDSLGNPTHILRIGESYKEKQRTIQAKKEVEQRRAGGYSRKYASKAKNLADDMVRNTARDLLYYAVTQDAMLIFENLSRGFGRQGKRTFMAERQYTRMEDWLTAKLAYEGLPSKTYLSKTLAQYTSKTCSNCGFTITSADYDRVLEKLKKTATGWMTTINGKELKVEGQITYYNRYKRQNVVKDLSVELDRLSEESVNNDISSWTKGRSGEALSLLKKRFSHRPVQEKFVCLNCGFETHADEQAALNIARSWLFLRSQEYKKYQTNKTTGNTDKRAFVETWQSFYRKKLKEVWKPAV

SEQ ID NO: 9486 - protein, 978 aa, synthetic construct
QEIKRINKIRRRLVKDSNTKKAGKTGPMKTLLVRVMTPDLRERLENLRKKPENIPQPISNTSRANLNKLLTDYTEMKKAILHVYWEEFQKDPVGLMSRVAQPASKKIDQNKLKPEMDEKGNLTTAGFACSQCGQPLFVYKLEQVSEKGKAYTNYFGRCNVAEHEKLILLSQLKPEKDSDEAVTYSLGKFGQRALDFYSIHVTKESTHPVKPLAQIAGNRYASGPVGKALSDACMGTIASFLSKYQDIIIEHQKVVKGNQKRLESLRELAGKENLEYPSVTLPPQPHTKEGVDAYNEVIARVRMWVNLNLWQKLKLSRDDAKPLLRLKGFPSFPLVERQANEVDWWDMVCNVKKLINEKKEDGKVFWQNLAGYKRQEALRPYLSSEEDRKKGKKFARTQLGDLLLHLEKKHGEDWGKVYDEAWERIDKKVEGLSKHIKLEEERRSEDAQSKAALTDWLRAKASFVIEGLKEADKDEFCRCELKLQKWYGDLRGKPFAIEAENSILDISGFSKQYNCAFIWQKDGVKKLNLYLIINYFKGGKLRFKKIKPEAFEANRFYTVINKKSGEIVPMEVNFNFDDPNLIILPLAFGKRQGREFIWNDLLSLETGSLKLANGRVIEKTLYNRRTRQDEPALFVALTFERREVLDSSNIKPMNLIGVDRGENIPAVIALTDPEGCPLSRFKDSLGNPTHILRIGESYKEKQRTIQAKKEVEQRRAGGYSRKYASKAKNLADDMVRNTARDLLYYAVTQDAMLIFENLSRGFGRQGKRTFMAERQYTRMEDWLTAKLAYEGLPSKTYLSKTLAQYTSKTCSNCGFTITSADYDRVLEKLKKTATGWMTTINGKELKVEGQITYYNRYKRQNVVKDLSVELDRLSEESVNNDISSWTKGRSGEALSLLKKRFSHRPVQEKFVCLNCGFETHADEQAALNIARSWLFLRSQEYKKYQTNKTTGNTDKRAFVETWQSFYRKKLKEVWKPAV

SEQ ID NO: 9487 - protein, 978 aa, synthetic construct
QEIKRINKIRRRLVKDSNTKKAGKTGPMKTLLVRVMTPDLRERLENLRKKPENIPQPISNTSRANLNKLLTDYTEMKKAILHVYWEEFQKDPVGLMSRVAQPASKKIDQNKLKPEMDEKGNLTTAGFACSQCGQPLFVYKLEQVSEKGKAYTNYFGRCNVAEHEKLILLSQLKPEKDSDEAVTYSLGKFGQRALDFYSIHVTKESTHPVKPLAQIAGNRYASGPVGKALSDACMGTIASFLSKYQDIIIEHQKVVKGNQKRLESLRELAGKENLEYPSVTLPPQPHTKEGVDAYNEVIARVRMWVNLNLWQKLKLSRDDAKPLLRLKGFPSFPLVERQANEVDWWDMVCNVKKLINEKKEDGKVFWQNLAGYKRQEALRPYLSSEEDRKKGKKFARYQLGDLLLHLEKKHGEDWGKVYDEAWERIDKKVEGLSKHIKLEEERRSEDAQSKAALTDWLRAKASFVIEGLKEADKDEFCRCELKLQKWYGDLRGKPFAIEAENSILDISGFSKQYNCAFIWQKDGVKKLNLYLIINYFKGGKLRFKKIKPEAFEANRFYTVINKKSGEIVPMEVNFNFDDPNLIILPLAFGKRQGREFIWNDLLSLETGSLKLANGRVIEKTLYNRRTRQDEPALFVALTFERREVLDSSNIKPMNLIGVDRGENIPAVIALTDPEGCPLSRFKDSLGNPTHILRIGESYKEKQRTIQAKKEVEQRRAGGYSRKYASKAKNLADDMVRNTARDLLYYAVTQDAMLIFENLSRGFGRQGKRTFMAERQYTRMEDWLTAKLAYEGLPSKTYLSKTLAQYTSKTCSNCGFTITSADYDRMLEKLKKTATGWMTTINGKELKVEGQITYYNRYKRQNVVKDLSVELDRLSEESVNNDISSWTKGRSGEALSLLKKRFSHRPVQEKFVCLNCGFETHADEQAALNIARSWLFLRSQEYKKYQTNKTTGNTDKRAFVETWQSFYRKKLKEVWKPAV

SEQ ID NO: 9488 - protein, 978 aa, synthetic construct
QEIKRINKIRRRLVKDSNTKKAGKTGPMKTLLVRVMTPDLRERLENLRKKPENIPQPISNTSRANLNKLLTDYTEMKKAILHVYWEEFQKDPVGLMSRVAQPASKKIDQNKLKPEMDEKGNLTTAGFACSQCGQPLFVYKLEQVSEKGKAYTNYFGRCNVAEHEKLILLSQLKPEKDSDEAVTYSLGKFGQRALDFYSIHVTKESTHPVKPLAQIAGNRYASGPVGKALSDACMGTIASFLSKYQDIIIEHQKVVKGNQKRLESLRELAGKENLEYPSVTLPPQPHTKEGVDAYNEVIARVRMWVNLNLWQKLKLSRDDAKPLLRLKGFPSFPLVERQANEVDWWDMVCNVKKLINEKKEDGKVFWQNLAGYKRQEALRPYLSSEEDRKKGKKFARYQLGDLLLHLEKKHGEDWGKVYDEAWERIDKKVEGLSKHIKLEEERRSEDAQSKAALTDWLRAKASFVIEGLKEADKDEFCRCELKLQKWYGDLRGKPFAIEAENSILDISGFSKQYNCAFIWQKDGVKKLNLYLIINYFKGGKLRFKKIKPEAFEANRFYTVINKKSGEIVPMEVNFNFDDPNLIILPLAFGKRQGREFIWNDLLSLETGSLKLANGRVIEKTLYNRRTRQDEPALFVALTFERREVLDSSNIKPMNLIGVDRGENIPAVIALTDPEGCPLSRFKDSLGNPTHILRIGESYKEKQRTIQAKKEVEQRRAGGYSRKYASKAKNLADDMVRNTARDLLYYAVTQDAMLIFENLSRGFGRQGKRTFMAERQYTRMEDWLTAKLAYEGLPSKTYLSKTLAQYTSKTCSNCGFTITSADYDRVLEKLKKTATGWMTTINGKELKVEGQITYYNRYKRQNVVKDLSVELDRLSEESVNNDISSWDKGRSGEALSLLKKRFSHRPVQEKFVCLNCGFETHADEQAALNIARSWLFLRSQEYKKYQTNKTTGNTDKRAFVETWQSFYRKKLKEVWKPAV

SEQ ID NO: 9489 - protein, 978 aa, synthetic construct
QEIKRINKIRRRLVKDSNTKKAGKTGPMKTLLVRVMTPDLRERLENLRKKPENIPQPISNTSRANLNKLLTDYTEMKKAILHVYWEEFQKDPVGLMSRVAQPASKKIDQNKLKPEMDEKGNLTTAGFACSQCGQPLFVYKLEQVSEKGKAYTNYFGRCNVAEHEKLILLSQLKPEKDSDEAVTYSLGKFGQRALDFYSIHVTKESTHPVKPLAQIAGNRYASGPVGKALSDACMGTIASFLSKYQDIIIEHQKVVKGNQKRLESLRELAGKENLEYPSVTLPPQPHTKEGVDAYNEVIARVRMWVNLNLWQKLKLSRDDAKPLLRLKGFPSFPLVERQANEVDWWDMVCNVKKLINEKKEDGKVFWQNLAGYKRQEALRPYLSSEEDRKKGKKFARYQLGDLLLHLEKKHGEDWGKVYDEAWERIDKKVEGLSKHIKLEEERRSEDAQSKAALTDWLRAKASFVIEGLKEADKDEFCRCELKLQKWYGDLRGKPFAIEAENSILDISGFSKQYNCAFIWQKDGVKKLNLYLIINYFKGGKLRFKKIKPEAFEANRFYTVINKKSGEIVPMEVNFNFDDPNLIILPLAFGKRQGREFIWNDLLSLETGSLKLANGRVIEKTLYNRRTRQDEPALFVALTFERREVLDSSNIKPMNLIGVDRGENIPAVIALTDPEGCPLSRFKDSLGNPTHILRIGESYKEKQRTIQAKKEVEQRRAGGYSRKYASKAKNLADDMVRNTARDLLYYAVTQDAMLIFENLSRGFGRQGKRTFMAERQYTRMEDWLTAKLAYEGLPSKTYLSKTLAQYTSKTCSNCGFTITSADYDRVLEKLKKTATGWMTTINGKELKVEGQITYYNRYKRQNVVKDLSVELDRLSEESVNNDISSWTKGRQGEALSLLKKRFSHRPVQEKFVCLNCGFETHADEQAALNIARSWLFLRSQEYKKYQTNKTTGNTDKRAFVETWQSFYRKKLKEVWKPAV

SEQ ID NO: 9490 - protein, 978 aa, synthetic construct
QEGKRINKIRRRLVKDSNTKKAGKTGPMKTLLVPVMTPDLRERLENLRKKPENIPQPISNTSRANLNKLLTDYTEMKKAILHVYWEEFQKDPVGLMSRVAQPASKKIDQNKLKPEMDEKGNLTTAGFACSQCGQPLFVYKLEQVSEKGKAYTNYFGRCNVAEHEKLILLAQLKPEKDSDEAVTYSLGKFGQRALDFYSIHVTKESTHPVKPLAQIAGNRYASGPVGKALSDACMGTIASFLSKYQDIIIEHQKVVKGNQKRLESLRELAGKENLEYPSVTLPPQPHTKEGVDAYNEVIARVRMWVNLNLWQKLKLSRDDAKPLLRLKGFPSFPLVERQANEVDWWDMVCNVKKLINEKKEDGKVFWQNLAGYKRQEALRPYLSSEEDRKKGKKFARYQLGDLLLHLEKKHGEDWGKVYDEAWERIDKKVEGLSKHIKLEEERRSEDAQSKAALTDWLRAKASFVIEGLKEADKDEFCRCELKLQKWYGDLRGKPFAIEAENSILDISGFSKQYNCAFIWQKDGVKKLNLYLIINYFKGGKLRFKKIKPEAFEANRFYTVINKKSGEIVPMEVNFNFDDPNLIILPLAFGKRQGREFIWNDLLSLETGSLKLANGRVIEKTLYNRRTRQDEPALFVALTFERREVLDSSNIKPMNLIGVDRGENIPAVIALTDPEGCPLSRFKDSLGNPTHILRIGESYKEKQRTIQAKKEVEQRRAGGYSRKYASKAKNLADDMVRNTARDLLYYAVTQDAMLIFENLSRGFGRQGKRTFMAERQYTRMEDWLTAKLAYEGLPSKTYLSKTLAQYTSKTCSNCGFTITSADYDRVLEKLKKTATGWMTTINGKELKVEGQITYYNRYKRQNVVKDLSVELDRLSEESVNNDISSWTKGRSGEALSLLKKRFSHRPVQEKFVCLNCGFETHADEQAALNIARSWLFLRSQEYKKYQTNKTTGNTDKRAFVETWQSFYRKKLKEVWKPAV

SEQ ID NO: 9491 - protein, 978 aa, synthetic construct
QEIKRINKIRRRLVKDSNTKKAGKTGPMKTLLVRVMTPDLRERLENLRKKPENIPQPISNTSRANLNKLLTDYTEMKKAILHVYWEEFQKDPVGLMSRVAQPASKKIDQNKLKPEMDEKGNLTTAGFACSQCGQPLFVYKLEQVSEKGKAYTNYFGRCNVAEHEKLILLAQLKPEKDSDEAVTYSLGKFGQRALDFYSIHVTKESTHPVKPLAQIAGNRYASTPVGKALSDACMGTIASFLSKYQDIIIEHQKVVKGNQKRLESLRELAGKENLEYPSVTLPPQPHTKEGVDAYNEVIARVRTWVNLNLWQKLKLSRDDAKPLLRLKGFPSFPLVERQANEVDWWDMVCNVKKLINEKKEDGKVFWQNLAGYKRQEALRPYLSSEEDRKKGKKFARYQLGDLLLHLEKKHGEDWGKVYDEAWERIDKKVEGLSKHIKLEEERRSEDAQSKAALTDWLRAKASFVIEGLKEADKDEFCRCELKLQKWYGDLRGKPFAIEAENSILDISGFSKQYNCAFIWQKDGVKKLNLYLIINYFKGGKLRFKKIKPEAFEANRFYTVINKKSGEIVPMEVNFNFDDPNLIILPLAFGKRQGREFIWNDLLSLETGSLKLANGRVIEKTLYNRRTRQDEPALFVALTFERREVLDSSNIKPMNLIGVDRGENIPAVIALTDPEGCPLSRFKDSLGNPTHILRIGESYKEKQRTIQAKKEVEQRRAGGYSRKYASKAKNLADDMVRNTARDLLYYAVTQDAMLIFENLSRGFGRQGKRTFMAERQYTRMEDWLTAKLAYEGLPSKTYLSKTLAQYTSKTCSNCGFTITSADYDRVLEKLKKTATGWMTTINGKELKVEGQITYYNRYKRQNVVKDLSVELDRLSEESVNNDISSWTKGRSGEALSLLKKRFSHRPVQEKFVCLNCGFETHADEQAALNIARSWLFLRSQEYKKYQTNKTTGNTDKRAFVETWQSFYRKKLKEVWKPAV

SEQ ID NO: 9492 - protein, 978 aa, synthetic construct
QEIKRINKIRRRLVKDSNTKKAGKTGPMKTLLVRVMTPDLRERLENLRKKPENIPQPISNTSRANLNKLLTDYTEMKKAILHVYWEEFQKDPVGLMSRVAQPASKKIDQNKLKPEMDEKGNLTTAGFACSQCGQPLFVYKLEQVSEKGKAYTNYFGRCNVAEHEKLILLAQLKPEKDSDEAVTYSLGKFGQRALDFYSIHVTKESTHPVKPLAQIAGNRYASTPVGKALSDACMGTIASFLSKYQDIIIEHQKVVKGNQKRLESLRELAGKENLEYPSVTLPPQPHTKEGVDAYNEVIARVRMWVNLNLWQKLKLSRDDAKPLLRLKGFPSFPLVERQANEVDWWDMVCNVKKLINEKKEDGKVFWQNLAGYKRQEALRPYLSSEEDRKKGKKFARTQLGDLLLHLEKKHGEDWGKVYDEAWERIDKKVEGLSKHIKLEEERRSEDAQSKAALTDWLRAKASFVIEGLKEADKDEFCRCELKLQKWYGDLRGKPFAIEAENSILDISGFSKQYNCAFIWQKDGVKKLNLYLIINYFKGGKLRFKKIKPEAFEANRFYTVINKKSGEIVPMEVNFNFDDPNLIILPLAFGKRQGREFIWNDLLSLETGSLKLANGRVIEKTLYNRRTRQDEPALFVALTFERREVLDSSNIKPMNLIGVDRGENIPAVIALTDPEGCPLSRFKDSLGNPTHILRIGESYKEKQRTIQAKKEVEQRRAGGYSRKYASKAKNLADDMVRNTARDLLYYAVTQDAMLIFENLSRGFGRQGKRTFMAERQYTRMEDWLTAKLAYEGLPSKTYLSKTLAQYTSKTCSNCGFTITSADYDRVLEKLKKTATGWMTTINGKELKVEGQITYYNRYKRQNVVKDLSVELDRLSEESVNNDISSWTKGRSGEALSLLKKRFSHRPVQEKFVCLNCGFETHADEQAALNIARSWLFLRSQEYKKYQTNKTTGNTDKRAFVETWQSFYRKKLKEVWKPAV

SEQ ID NO: 9493 - protein, 978 aa, synthetic construct
QEIKRINKIRRRLVKDSNTKKAGKTGPMKTLLVRVMTPDLRERLENLRKKPENIPQPISNTSRANLNKLLTDYTEMKKAILHVYWEEFQKDPVGLMSRVAQPASKKIDQNKLKPEMDEKGNLTTAGFACSQCGQPLFVYKLEQVSEKGKAYTNYFGRCNVAEHEKLILLAQLKPEKDSDEAVTYSLGKFGQRALDFYSIHVTKESTHPVKPLAQIAGNRYASTPVGKALSDACMGTIASFLSKYQDIIIEHQKVVKGNQKRLESLRELAGKENLEYPSVTLPPQPHTKEGVDAYNEVIARVRMWVNLNLWQKLKLSRDDAKPLLRLKGFPSFPLVERQANEVDWWDMVCNVKKLINEKKEDGKVFWQNLAGYKRQEALRPYLSSEEDRKKGKKFARYQLGDLLLHLEKKHGEDWGKVYDEAWERIDKKVEGLSKHIKLEEERRSEDAQSKAALTDWLRAKASFVIEGLKEADKDEFCRCELKLQKWYGDLRGKPFAIEAENSILDISGFSKQYNCAFIWQKDGVKKLNLYLIINYFKGGKLRFKKIKPEAFEANRFYTVINKKSGEIVPMEVNFNFDDPNLIILPLAFGKRQGREFIWNDLLSLETGSLKLANGRVIEKTLYNRRTRQDEPALFVALTFERREVLDSSNIKPMNLIGVDRGENIPAVIALTDPEGCPLSRFKDSLGNPTHILRIGESYKEKQRTIQAKKEVEQRRAGGYSRKYASKAKNLADDMVRNTARDLLYYAVTQDAMLIFENLSRGFGRQGKRTFMAERQYTRMEDWLTAKLAYEGLPSKTYLSKTLAQYTSKTCSNCGFTITSADYDRMLEKLKKTATGWMTTINGKELKVEGQITYYNRYKRQNVVKDLSVELDRLSEESVNNDISSWTKGRSGEALSLLKKRFSHRPVQEKFVCLNCGFETHADEQAALNIARSWLFLRSQEYKKYQTNKTTGNTDKRAFVETWQSFYRKKLKEVWKPAV

SEQ ID NO: 9494 - protein, 978 aa, synthetic construct
QEIKRINKIRRRLVKDSNTKKAGKTGPMKTLLVRVMTPDLRERLENLRKKPENIPQPISNTSRANLNKLLTDYTEMKKAILHVYWEEFQKDPVGLMSRVAQPASKKIDQNKLKPEMDEKGNLTTAGFACSQCGQPLFVYKLEQVSEKGKAYTNYFGRCNVAEHEKLILLAQLKPEKDSDEAVTYSLGKFGQRALDFYSIHVTKESTHPVKPLAQIAGNRYASTPVGKALSDACMGTIASFLSKYQDIIIEHQKVVKGNQKRLESLRELAGKENLEYPSVTLPPQPHTKEGVDAYNEVIARVRMWVNLNLWQKLKLSRDDAKPLLRLKGFPSFPLVERQANEVDWWDMVCNVKKLINEKKEDGKVFWQNLAGYKRQEALRPYLSSEEDRKKGKKFARYQLGDLLLHLEKKHGEDWGKVYDEAWERIDKKVEGLSKHIKLEEERRSEDAQSKAALTDWLRAKASFVIEGLKEADKDEFCRCELKLQKWYGDLRGKPFAIEAENSILDISGFSKQYNCAFIWQKDGVKKLNLYLIINYFKGGKLRFKKIKPEAFEANRFYTVINKKSGEIVPMEVNFNFDDPNLIILPLAFGKRQGREFIWNDLLSLETGSLKLANGRVIEKTLYNRRTRQDEPALFVALTFERREVLDSSNIKPMNLIGVDRGENIPAVIALTDPEGCPLSRFKDSLGNPTHILRIGESYKEKQRTIQAKKEVEQRRAGGYSRKYASKAKNLADDMVRNTARDLLYYAVTQDAMLIFENLSRGFGRQGKRTFMAERQYTRMEDWLTAKLAYEGLPSKTYLSKTLAQYTSKTCSNCGFTITSADYDRVLEKLKKTATGWMTTINGKELKVEGQITYYNRYKRQNVVKDLSVELDRLSEESVNNDISSWDKGRSGEALSLLKKRFSHRPVQEKFVCLNCGFETHADEQAALNIARSWLFLRSQEYKKYQTNKTTGNTDKRAFVETWQSFYRKKLKEVWKPAV

SEQ ID NO: 9495 - protein, 978 aa, synthetic construct
QEIKRINKIRRRLVKDSNTKKAGKTGPMKTLLVRVMTPDLRERLENLRKKPENIPQPISNTSRANLNKLLTDYTEMKKAILHVYWEEFQKDPVGLMSRVAQPASKKIDQNKLKPEMDEKGNLTTAGFACSQCGQPLFVYKLEQVSEKGKAYTNYFGRCNVAEHEKLILLAQLKPEKDSDEAVTYSLGKFGQRALDFYSIHVTKESTHPVKPLAQIAGNRYASTPVGKALSDACMGTIASFLSKYQDIIIEHQKVVKGNQKRLESLRELAGKENLEYPSVTLPPQPHTKEGVDAYNEVIARVRMWVNLNLWQKLKLSRDDAKPLLRLKGFPSFPLVERQANEVDWWDMVCNVKKLINEKKEDGKVFWQNLAGYKRQEALRPYLSSEEDRKKGKKFARYQLGDLLLHLEKKHGEDWGKVYDEAWERIDKKVEGLSKHIKLEEERRSEDAQSKAALTDWLRAKASFVIEGLKEADKDEFCRCELKLQKWYGDLRGKPFAIEAENSILDISGFSKQYNCAFIWQKDGVKKLNLYLIINYFKGGKLRFKKIKPEAFEANRFYTVINKKSGEIVPMEVNFNFDDPNLIILPLAFGKRQGREFIWNDLLSLETGSLKLANGRVIEKTLYNRRTRQDEPALFVALTFERREVLDSSNIKPMNLIGVDRGENIPAVIALTDPEGCPLSRFKDSLGNPTHILRIGESYKEKQRTIQAKKEVEQRRAGGYSRKYASKAKNLADDMVRNTARDLLYYAVTQDAMLIFENLSRGFGRQGKRTFMAERQYTRMEDWLTAKLAYEGLPSKTYLSKTLAQYTSKTCSNCGFTITSADYDRVLEKLKKTATGWMTTINGKELKVEGQITYYNRYKRQNVVKDLSVELDRLSEESVNNDISSWTKGRQGEALSLLKKRFSHRPVQEKFVCLNCGFETHADEQAALNIARSWLFLRSQEYKKYQTNKTTGNTDKRAFVETWQSFYRKKLKEVWKPAV

SEQ ID NO: 9496 - protein, 979 aa, synthetic construct
QEIGKRINKIRRRLVKDSNTKKAGKTGPMKTLLVPVMTPDLRERLENLRKKPENIPQPISNTSRANLNKLLTDYTEMKKAILHVYWEEFQKDPVGLMSRVAQPASKKIDQNKLKPEMDEKGNLTTAGFACSQCGQPLFVYKLEQVSEKGKAYTNYFGRCNVAEHEKLILLAQLKPEKDSDEAVTYSLGKFGQRALDFYSIHVTKESTHPVKPLAQIAGNRYASGPVGKALSDACMGTIASFLSKYQDIIIEHQKVVKGNQKRLESLRELAGKENLEYPSVTLPPQPHTKEGVDAYNEVIARVRMWVNLNLWQKLKLSRDDAKPLLRLKGFPSFPLVERQANEVDWWDMVCNVKKLINEKKEDGKVFWQNLAGYKRQEALRPYLSSEEDRKKGKKFARYQLGDLLLHLEKKHGEDWGKVYDEAWERIDKKVEGLSKHIKLEEERRSEDAQSKAALTDWLRAKASFVIEGLKEADKDEFCRCELKLQKWYGDLRGKPFAIEAENSILDISGFSKQYNCAFIWQKDGVKKLNLYLIINYFKGGKLRFKKIKPEAFEANRFYTVINKKSGEIVPMEVNFNFDDPNLIILPLAFGKRQGREFIWNDLLSLETGSLKLANGRVIEKTLYNRRTRQDEPALFVALTFERREVLDSSNIKPMNLIGVDRGENIPAVIALTDPEGCPLSRFKDSLGNPTHILRIGESYKEKQRTIQAKKEVEQRRAGGYSRKYASKAKNLADDMVRNTARDLLYYAVTQDAMLIFENLSRGFGRQGKRTFMAERQYTRMEDWLTAKLAYEGLPSKTYLSKTLAQYTSKTCSNCGFTITSADYDRVLEKLKKTATGWMTTINGKELKVEGQITYYNRYKRQNVVKDLSVELDRLSEESVNNDISSWTKGRSGEALSLLKKRFSHRPVQEKFVCLNCGFETHADEQAALNIARSWLFLRSQEYKKYQTNKTTGNTDKRAFVETWQSFYRKKLKEVWKPAV

SEQ ID NO: 9497 - protein, 979 aa, synthetic construct
QEGKRINKIRRRLVKDSNTKKAGKTRGPMKTLLVRVMTPDLRERLENLRKKPENIPQPISNTSRANLNKLLTDYTEMKKAILHVYWEEFQKDPVGLMSRVAQPASKKIDQNKLKPEMDEKGNLTTAGFACSQCGQPLFVYKLEQVSEKGKAYTNYFGRCNVAEHEKLILLAQLKPEKDSDEAVTYSLGKFGQRALDFYSIHVTKESTHPVKPLAQIAGNRYASGPVGKALSDACMGTIASFLSKYQDIIIEHQKVVKGNQKRLESLRELAGKENLEYPSVTLPPQPHTKEGVDAYNEVIARVRMWVNLNLWQKLKLSRDDAKPLLRLKGFPSFPLVERQANEVDWWDMVCNVKKLINEKKEDGKVFWQNLAGYKRQEALRPYLSSEEDRKKGKKFARYQLGDLLLHLEKKHGEDWGKVYDEAWERIDKKVEGLSKHIKLEEERRSEDAQSKAALTDWLRAKASFVIEGLKEADKDEFCRCELKLQKWYGDLRGKPFAIEAENSILDISGFSKQYNCAFIWQKDGVKKLNLYLIINYFKGGKLRFKKIKPEAFEANRFYTVINKKSGEIVPMEVNFNFDDPNLIILPLAFGKRQGREFIWNDLLSLETGSLKLANGRVIEKTLYNRRTRQDEPALFVALTFERREVLDSSNIKPMNLIGVDRGENIPAVIALTDPEGCPLSRFKDSLGNPTHILRIGESYKEKQRTIQAKKEVEQRRAGGYSRKYASKAKNLADDMVRNTARDLLYYAVTQDAMLIFENLSRGFGRQGKRTFMAERQYTRMEDWLTAKLAYEGLPSKTYLSKTLAQYTSKTCSNCGFTITSADYDRVLEKLKKTATGWMTTINGKELKVEGQITYYNRYKRQNVVKDLSVELDRLSEESVNNDISSWTKGRSGEALSLLKKRFSHRPVQEKFVCLNCGFETHADEQAALNIARSWLFLRSQEYKKYQTNKTTGNTDKRAFVETWQSFYRKKLKEVWKPAV

SEQ ID NO: 9498 - protein, 978 aa, synthetic construct
QEIKRINKIRRRLVKDSNTKKAGKTGPMKTLLVRVMTPDLRERLENLRKKPENIPQPISNTSRANLNKLLTDYTEMKKAILHVYWEEFQKDPVGLMSRVAQPASKKIDQNKLKPEMDEKGNLTTAGFACSQCGQPLFVYKLEQVSEKGKAYTNYFGRCNVAEHEKLILLAQLKPEKDSDEAVTYSLGKFGQRALDFYSIHVTKESTHPVKPLAQIAGNRYASGPVGKALSDACMGTIASFLSKYQDIIIEHQKVVKGNQKRLESLRELAGKENLEYPSVTLPPQPHTKEGVDAYNEVIARVRTWVNLNLWQKLKLSRDDAKPLLRLKGFPSFPLVERQANEVDWWDMVCNVKKLINEKKEDGKVFWQNLAGYKRQEALRPYLSSEEDRKKGKKFARTQLGDLLLHLEKKHGEDWGKVYDEAWERIDKKVEGLSKHIKLEEERRSEDAQSKAALTDWLRAKASFVIEGLKEADKDEFCRCELKLQKWYGDLRGKPFAIEAENSILDISGFSKQYNCAFIWQKDGVKKLNLYLIINYFKGGKLRFKKIKPEAFEANRFYTVINKKSGEIVPMEVNFNFDDPNLIILPLAFGKRQGREFIWNDLLSLETGSLKLANGRVIEKTLYNRRTRQDEPALFVALTFERREVLDSSNIKPMNLIGVDRGENIPAVIALTDPEGCPLSRFKDSLGNPTHILRIGESYKEKQRTIQAKKEVEQRRAGGYSRKYASKAKNLADDMVRNTARDLLYYAVTQDAMLIFENLSRGFGRQGKRTFMAERQYTRMEDWLTAKLAYEGLPSKTYLSKTLAQYTSKTCSNCGFTITSADYDRVLEKLKKTATGWMTTINGKELKVEGQITYYNRYKRQNVVKDLSVELDRLSEESVNNDISSWTKGRSGEALSLLKKRFSHRPVQEKFVCLNCGFETHADEQAALNIARSWLFLRSQEYKKYQTNKTTGNTDKRAFVETWQSFYRKKLKEVWKPAV

SEQ ID NO: 9499 - protein, 978 aa, synthetic construct
QEIKRINKIRRRLVKDSNTKKAGKTGPMKTLLVRVMTPDLRERLENLRKKPENIPQPISNTSRANLNKLLTDYTEMKKAILHVYWEEFQKDPVGLMSRVAQPASKKIDQNKLKPEMDEKGNLTTAGFACSQCGQPLFVYKLEQVSEKGKAYTNYFGRCNVAEHEKLILLAQLKPEKDSDEAVTYSLGKFGQRALDFYSIHVTKESTHPVKPLAQIAGNRYASGPVGKALSDACMGTIASFLSKYQDIIIEHQKVVKGNQKRLESLRELAGKENLEYPSVTLPPQPHTKEGVDAYNEVIARVRTWVNLNLWQKLKLSRDDAKPLLRLKGFPSFPLVERQANEVDWWDMVCNVKKLINEKKEDGKVFWQNLAGYKRQEALRPYLSSEEDRKKGKKFARYQLGDLLLHLEKKHGEDWGKVYDEAWERIDKKVEGLSKHIKLEEERRSEDAQSKAALTDWLRAKASFVIEGLKEADKDEFCRCELKLQKWYGDLRGKPFAIEAENSILDISGFSKQYNCAFIWQKDGVKKLNLYLIINYFKGGKLRFKKIKPEAFEANRFYTVINKKSGEIVPMEVNFNFDDPNLIILPLAFGKRQGREFIWNDLLSLETGSLKLANGRVIEKTLYNRRTRQDEPALFVALTFERREVLDSSNIKPMNLIGVDRGENIPAVIALTDPEGCPLSRFKDSLGNPTHILRIGESYKEKQRTIQAKKEVEQRRAGGYSRKYASKAKNLADDMVRNTARDLLYYAVTQDAMLIFENLSRGFGRQGKRTFMAERQYTRMEDWLTAKLAYEGLPSKTYLSKTLAQYTSKTCSNCGFTITSADYDRMLEKLKKTATGWMTTINGKELKVEGQITYYNRYKRQNVVKDLSVELDRLSEESVNNDISSWTKGRSGEALSLLKKRFSHRPVQEKFVCLNCGFETHADEQAALNIARSWLFLRSQEYKKYQTNKTTGNTDKRAFVETWQSFYRKKLKEVWKPAV

SEQ ID NO: 9500 - protein, 978 aa, synthetic construct
QEIKRINKIRRRLVKDSNTKKAGKTGPMKTLLVRVMTPDLRERLENLRKKPENIPQPISNTSRANLNKLLTDYTEMKKAILHVYWEEFQKDPVGLMSRVAQPASKKIDQNKLKPEMDEKGNLTTAGFACSQCGQPLFVYKLEQVSEKGKAYTNYFGRCNVAEHEKLILLAQLKPEKDSDEAVTYSLGKFGQRALDFYSIHVTKESTHPVKPLAQIAGNRYASGPVGKALSDACMGTIASFLSKYQDIIIEHQKVVKGNQKRLESLRELAGKENLEYPSVTLPPQPHTKEGVDAYNEVIARVRTWVNLNLWQKLKLSRDDAKPLLRLKGFPSFPLVERQANEVDWWDMVCNVKKLINEKKEDGKVFWQNLAGYKRQEALRPYLSSEEDRKKGKKFARYQLGDLLLHLEKKHGEDWGKVYDEAWERIDKKVEGLSKHIKLEEERRSEDAQSKAALTDWLRAKASFVIEGLKEADKDEFCRCELKLQKWYGDLRGKPFAIEAENSILDISGFSKQYNCAFIWQKDGVKKLNLYLIINYFKGGKLRFKKIKPEAFEANRFYTVINKKSGEIVPMEVNFNFDDPNLIILPLAFGKRQGREFIWNDLLSLETGSLKLANGRVIEKTLYNRRTRQDEPALFVALTFERREVLDSSNIKPMNLIGVDRGENIPAVIALTDPEGCPLSRFKDSLGNPTHILRIGESYKEKQRTIQAKKEVEQRRAGGYSRKYASKAKNLADDMVRNTARDLLYYAVTQDAMLIFENLSRGFGRQGKRTFMAERQYTRMEDWLTAKLAYEGLPSKTYLSKTLAQYTSKTCSNCGFTITSADYDRVLEKLKKTATGWMTTINGKELKVEGQITYYNRYKRQNVVKDLSVELDRLSEESVNNDISSWDKGRSGEALSLLKKRFSHRPVQEKFVCLNCGFETHADEQAALNIARSWLFLRSQEYKKYQTNKTTGNTDKRAFVETWQSFYRKKLKEVWKPAV

SEQ ID NO: 9501 - protein, 978 aa, synthetic construct
QEIKRINKIRRRLVKDSNTKKAGKTGPMKTLLVRVMTPDLRERLENLRKKPENIPQPISNTSRANLNKLLTDYTEMKKAILHVYWEEFQKDPVGLMSRVAQPASKKIDQNKLKPEMDEKGNLTTAGFACSQCGQPLFVYKLEQVSEKGKAYTNYFGRCNVAEHEKLILLAQLKPEKDSDEAVTYSLGKFGQRALDFYSIHVTKESTHPVKPLAQIAGNRYASGPVGKALSDACMGTIASFLSKYQDIIIEHQKVVKGNQKRLESLRELAGKENLEYPSVTLPPQPHTKEGVDAYNEVIARVRTWVNLNLWQKLKLSRDDAKPLLRLKGFPSFPLVERQANEVDWWDMVCNVKKLINEKKEDGKVFWQNLAGYKRQEALRPYLSSEEDRKKGKKFARYQLGDLLLHLEKKHGEDWGKVYDEAWERIDKKVEGLSKHIKLEEERRSEDAQSKAALTDWLRAKASFVIEGLKEADKDEFCRCELKLQKWYGDLRGKPFAIEAENSILDISGFSKQYNCAFIWQKDGVKKLNLYLIINYFKGGKLRFKKIKPEAFEANRFYTVINKKSGEIVPMEVNFNFDDPNLIILPLAFGKRQGREFIWNDLLSLETGSLKLANGRVIEKTLYNRRTRQDEPALFVALTFERREVLDSSNIKPMNLIGVDRGENIPAVIALTDPEGCPLSRFKDSLGNPTHILRIGESYKEKQRTIQAKKEVEQRRAGGYSRKYASKAKNLADDMVRNTARDLLYYAVTQDAMLIFENLSRGFGRQGKRTFMAERQYTRMEDWLTAKLAYEGLPSKTYLSKTLAQYTSKTCSNCGFTITSADYDRVLEKLKKTATGWMTTINGKELKVEGQITYYNRYKRQNVVKDLSVELDRLSEESVNNDISSWTKGRQGEALSLLKKRFSHRPVQEKFVCLNCGFETHADEQAALNIARSWLFLRSQEYKKYQTNKTTGNTDKRAFVETWQSFYRKKLKEVWKPAV

SEQ ID NO: 9502 - protein, 978 aa, synthetic construct
QEIKRINGIRRRLVKDSNTKKAGKTGPMKTLLVPVMTPDLRERLENLRKKPENIPQPISNTSRANLNKLLTDYTEMKKAILHVYWEEFQKDPVGLMSRVAQPASKKIDQNKLKPEMDEKGNLTTAGFACSQCGQPLFVYKLEQVSEKGKAYTNYFGRCNVAEHEKLILLAQLKPEKDSDEAVTYSLGKFGQRALDFYSIHVTKESTHPVKPLAQIAGNRYASGPVGKALSDACMGTIASFLSKYQDIIIEHQKVVKGNQKRLESLRELAGKENLEYPSVTLPPQPHTKEGVDAYNEVIARVRMWVNLNLWQKLKLSRDDAKPLLRLKGFPSFPLVERQANEVDWWDMVCNVKKLINEKKEDGKVFWQNLAGYKRQEALRPYLSSEEDRKKGKKFARYQLGDLLLHLEKKHGEDWGKVYDEAWERIDKKVEGLSKHIKLEEERRSEDAQSKAALTDWLRAKASFVIEGLKEADKDEFCRCELKLQKWYGDLRGKPFAIEAENSILDISGFSKQYNCAFIWQKDGVKKLNLYLIINYFKGGKLRFKKIKPEAFEANRFYTVINKKSGEIVPMEVNFNFDDPNLIILPLAFGKRQGREFIWNDLLSLETGSLKLANGRVIEKTLYNRRTRQDEPALFVALTFERREVLDSSNIKPMNLIGVDRGENIPAVIALTDPEGCPLSRFKDSLGNPTHILRIGESYKEKQRTIQAKKEVEQRRAGGYSRKYASKAKNLADDMVRNTARDLLYYAVTQDAMLIFENLSRGFGRQGKRTFMAERQYTRMEDWLTAKLAYEGLPSKTYLSKTLAQYTSKTCSNCGFTITSADYDRVLEKLKKTATGWMTTINGKELKVEGQITYYNRYKRQNVVKDLSVELDRLSEESVNNDISSWTKGRSGEALSLLKKRFSHRPVQEKFVCLNCGFETHADEQAALNIARSWLFLRSQEYKKYQTNKTTGNTDKRAFVETWQSFYRKKLKEVWKPAV

SEQ ID NO: 9503 - protein, 982 aa, synthetic construct
QEIGKRINKIRRRLVKDSNTKKAGKTRKTGPMKTLLVRVMTPDLRERLENLRKKPENIPQPISNTSRANLNKLLTDYTEMKKAILHVYWEEFQKDPVGLMSRVAQPASKKIDQNKLKPEMDEKGNLTTAGFACSQCGQPLFVYKLEQVSEKGKAYTNYFGRCNVAEHEKLILLAQLKPEKDSDEAVTYSLGKFGQRALDFYSIHVTKESTHPVKPLAQIAGNRYASGPVGKALSDACMGTIASFLSKYQDIIIEHQKVVKGNQKRLESLRELAGKENLEYPSVTLPPQPHTKEGVDAYNEVIARVRMWVNLNLWQKLKLSRDDAKPLLRLKGFPSFPLVERQANEVDWWDMVCNVKKLINEKKEDGKVFWQNLAGYKRQEALRPYLSSEEDRKKGKKFARYQLGDLLLHLEKKHGEDWGKVYDEAWERIDKKVEGLSKHIKLEEERRSEDAQSKAALTDWLRAKASFVIEGLKEADKDEFCRCELKLQKWYGDLRGKPFAIEAENSILDISGFSKQYNCAFIWQKDGVKKLNLYLIINYFKGGKLRFKKIKPEAFEANRFYTVINKKSGEIVPMEVNFNFDDPNLIILPLAFGKRQGREFIWNDLLSLETGSLKLANGRVIEKTLYNRRTRQDEPALFVALTFERREVLDSSNIKPMNLIGVDRGENIPAVIALTDPEGCPLSRFKDSLGNPTHILRIGESYKEKQRTIQAKKEVEQRRAGGYSRKYASKAKNLADDMVRNTARDLLYYAVTQDAMLIFENLSRGFGRQGKRTFMAERQYTRMEDWLTAKLAYEGLPSKTYLSKTLAQYTSKTCSNCGFTITSADYDRVLEKLKKTATGWMTTINGKELKVEGQITYYNRYKRQNVVKDLSVELDRLSEESVNNDISSWTKGRSGEALSLLKKRFSHRPVQEKFVCLNCGFETHADEQAALNIARSWLFLRSQEYKKYQTNKTTGNTDKRAFVETWQSFYRKKLKEVWKPAV

SEQ ID NO: 9504 - protein, 978 aa, synthetic construct
QEGKRINGIRRRLVKDSNTKKAGKTGPMKTLLVRVMTPDLRERLENLRKKPENIPQPISNTSRANLNKLLTDYTEMKKAILHVYWEEFQKDPVGLMSRVAQPASKKIDQNKLKPEMDEKGNLTTAGFACSQCGQPLFVYKLEQVSEKGKAYTNYFGRCNVAEHEKLILLAQLKPEKDSDEAVTYSLGKFGQRALDFYSIHVTKESTHPVKPLAQIAGNRYASGPVGKALSDACMGTIASFLSKYQDIIIEHQKVVKGNQKRLESLRELAGKENLEYPSVTLPPQPHTKEGVDAYNEVIARVRMWVNLNLWQKLKLSRDDAKPLLRLKGFPSFPLVERQANEVDWWDMVCNVKKLINEKKEDGKVFWQNLAGYKRQEALRPYLSSEEDRKKGKKFARYQLGDLLLHLEKKHGEDWGKVYDEAWERIDKKVEGLSKHIKLEEERRSEDAQSKAALTDWLRAKASFVIEGLKEADKDEFCRCELKLQKWYGDLRGKPFAIEAENSILDISGFSKQYNCAFIWQKDGVKKLNLYLIINYFKGGKLRFKKIKPEAFEANRFYTVINKKSGEIVPMEVNFNFDDPNLIILPLAFGKRQGREFIWNDLLSLETGSLKLANGRVIEKTLYNRRTRQDEPALFVALTFERREVLDSSNIKPMNLIGVDRGENIPAVIALTDPEGCPLSRFKDSLGNPTHILRIGESYKEKQRTIQAKKEVEQRRAGGYSRKYASKAKNLADDMVRNTARDLLYYAVTQDAMLIFENLSRGFGRQGKRTFMAERQYTRMEDWLTAKLAYEGLPSKTYLSKTLAQYTSKTCSNCGFTITSADYDRVLEKLKKTATGWMTTINGKELKVEGQITYYNRYKRQNVVKDLSVELDRLSEESVNNDISSWTKGRSGEALSLLKKRFSHRPVQEKFVCLNCGFETHADEQAALNIARSWLFLRSQEYKKYQTNKTTGNTDKRAFVETWQSFYRKKLKEVWKPAV

SEQ ID NO: 9505 - protein, 978 aa, synthetic construct
QEIKRINKIRRRLVKDSNTKKAGKTGPMKTLLVRVMTPDLRERLENLRKKPENIPQPISNTSRANLNKLLTDYTEMKKAILHVYWEEFQKDPVGLMSRVAQPASKKIDQNKLKPEMDEKGNLTTAGFACSQCGQPLFVYKLEQVSEKGKAYTNYFGRCNVAEHEKLILLAQLKPEKDSDEAVTYSLGKFGQRALDFYSIHVTKESTHPVKPLAQIAGNRYASGPVGKALSDACMGTIASFLSKYQDIIIEHQKVVKGNQKRLESLRELAGKENLEYPSVTLPPQPHTKEGVDAYNEVIARVRMWVNLNLWQKLKLSRDDAKPLLRLKGFPSFPLVERQANEVDWWDMVCNVKKLINEKKEDGKVFWQNLAGYKRQEALRPYLSSEEDRKKGKKFARTQLGDLLLHLEKKHGEDWGKVYDEAWERIDKKVEGLSKHIKLEEERRSEDAQSKAALTDWLRAKASFVIEGLKEADKDEFCRCELKLQKWYGDLRGKPFAIEAENSILDISGFSKQYNCAFIWQKDGVKKLNLYLIINYFKGGKLRFKKIKPEAFEANRFYTVINKKSGEIVPMEVNFNFDDPNLIILPLAFGKRQGREFIWNDLLSLETGSLKLANGRVIEKTLYNRRTRQDEPALFVALTFERREVLDSSNIKPMNLIGVDRGENIPAVIALTDPEGCPLSRFKDSLGNPTHILRIGESYKEKQRTIQAKKEVEQRRAGGYSRKYASKAKNLADDMVRNTARDLLYYAVTQDAMLIFENLSRGFGRQGKRTFMAERQYTRMEDWLTAKLAYEGLPSKTYLSKTLAQYTSKTCSNCGFTITSADYDRMLEKLKKTATGWMTTINGKELKVEGQITYYNRYKRQNVVKDLSVELDRLSEESVNNDISSWTKGRSGEALSLLKKRFSHRPVQEKFVCLNCGFETHADEQAALNIARSWLFLRSQEYKKYQTNKTTGNTDKRAFVETWQSFYRKKLKEVWKPAV

SEQ ID NO: 9506 - protein, 978 aa, synthetic construct
QEIKRINKIRRRLVKDSNTKKAGKTGPMKTLLVRVMTPDLRERLENLRKKPENIPQPISNTSRANLNKLLTDYTEMKKAILHVYWEEFQKDPVGLMSRVAQPASKKIDQNKLKPEMDEKGNLTTAGFACSQCGQPLFVYKLEQVSEKGKAYTNYFGRCNVAEHEKLILLAQLKPEKDSDEAVTYSLGKFGQRALDFYSIHVTKESTHPVKPLAQIAGNRYASGPVGKALSDACMGTIASFLSKYQDIIIEHQKVVKGNQKRLESLRELAGKENLEYPSVTLPPQPHTKEGVDAYNEVIARVRMWVNLNLWQKLKLSRDDAKPLLRLKGFPSFPLVERQANEVDWWDMVCNVKKLINEKKEDGKVFWQNLAGYKRQEALRPYLSSEEDRKKGKKFARTQLGDLLLHLEKKHGEDWGKVYDEAWERIDKKVEGLSKHIKLEEERRSEDAQSKAALTDWLRAKASFVIEGLKEADKDEFCRCELKLQKWYGDLRGKPFAIEAENSILDISGFSKQYNCAFIWQKDGVKKLNLYLIINYFKGGKLRFKKIKPEAFEANRFYTVINKKSGEIVPMEVNFNFDDPNLIILPLAFGKRQGREFIWNDLLSLETGSLKLANGRVIEKTLYNRRTRQDEPALFVALTFERREVLDSSNIKPMNLIGVDRGENIPAVIALTDPEGCPLSRFKDSLGNPTHILRIGESYKEKQRTIQAKKEVEQRRAGGYSRKYASKAKNLADDMVRNTARDLLYYAVTQDAMLIFENLSRGFGRQGKRTFMAERQYTRMEDWLTAKLAYEGLPSKTYLSKTLAQYTSKTCSNCGFTITSADYDRVLEKLKKTATGWMTTINGKELKVEGQITYYNRYKRQNVVKDLSVELDRLSEESVNNDISSWDKGRSGEALSLLKKRFSHRPVQEKFVCLNCGFETHADEQAALNIARSWLFLRSQEYKKYQTNKTTGNTDKRAFVETWQSFYRKKLKEVWKPAV

SEQ ID NO: 9507 - protein, 978 aa, synthetic construct
QEIKRINKIRRRLVKDSNTKKAGKTGPMKTLLVRVMTPDLRERLENLRKKPENIPQPISNTSRANLNKLLTDYTEMKKAILHVYWEEFQKDPVGLMSRVAQPASKKIDQNKLKPEMDEKGNLTTAGFACSQCGQPLFVYKLEQVSEKGKAYTNYFGRCNVAEHEKLILLAQLKPEKDSDEAVTYSLGKFGQRALDFYSIHVTKESTHPVKPLAQIAGNRYASGPVGKALSDACMGTIASFLSKYQDIIIEHQKVVKGNQKRLESLRELAGKENLEYPSVTLPPQPHTKEGVDAYNEVIARVRMWVNLNLWQKLKLSRDDAKPLLRLKGFPSFPLVERQANEVDWWDMVCNVKKLINEKKEDGKVFWQNLAGYKRQEALRPYLSSEEDRKKGKKFARTQLGDLLLHLEKKHGEDWGKVYDEAWERIDKKVEGLSKHIKLEEERRSEDAQSKAALTDWLRAKASFVIEGLKEADKDEFCRCELKLQKWYGDLRGKPFAIEAENSILDISGFSKQYNCAFIWQKDGVKKLNLYLIINYFKGGKLRFKKIKPEAFEANRFYTVINKKSGEIVPMEVNFNFDDPNLIILPLAFGKRQGREFIWNDLLSLETGSLKLANGRVIEKTLYNRRTRQDEPALFVALTFERREVLDSSNIKPMNLIGVDRGENIPAVIALTDPEGCPLSRFKDSLGNPTHILRIGESYKEKQRTIQAKKEVEQRRAGGYSRKYASKAKNLADDMVRNTARDLLYYAVTQDAMLIFENLSRGFGRQGKRTFMAERQYTRMEDWLTAKLAYEGLPSKTYLSKTLAQYTSKTCSNCGFTITSADYDRVLEKLKKTATGWMTTINGKELKVEGQITYYNRYKRQNVVKDLSVELDRLSEESVNNDISSWTKGRQGEALSLLKKRFSHRPVQEKFVCLNCGFETHADEQAALNIARSWLFLRSQEYKKYQTNKTTGNTDKRAFVETWQSFYRKKLKEVWKPAV

SEQ ID NO: 9508 - protein, 979 aa, synthetic construct
QEIKRINKIRRRLVKDSNTKKAGKTRGPMKTLLVPVMTPDLRERLENLRKKPENIPQPISNTSRANLNKLLTDYTEMKKAILHVYWEEFQKDPVGLMSRVAQPASKKIDQNKLKPEMDEKGNLTTAGFACSQCGQPLFVYKLEQVSEKGKAYTNYFGRCNVAEHEKLILLAQLKPEKDSDEAVTYSLGKFGQRALDFYSIHVTKESTHPVKPLAQIAGNRYASGPVGKALSDACMGTIASFLSKYQDIIIEHQKVVKGNQKRLESLRELAGKENLEYPSVTLPPQPHTKEGVDAYNEVIARVRMWVNLNLWQKLKLSRDDAKPLLRLKGFPSFPLVERQANEVDWWDMVCNVKKLINEKKEDGKVFWQNLAGYKRQEALRPYLSSEEDRKKGKKFARYQLGDLLLHLEKKHGEDWGKVYDEAWERIDKKVEGLSKHIKLEEERRSEDAQSKAALTDWLRAKASFVIEGLKEADKDEFCRCELKLQKWYGDLRGKPFAIEAENSILDISGFSKQYNCAFIWQKDGVKKLNLYLIINYFKGGKLRFKKIKPEAFEANRFYTVINKKSGEIVPMEVNFNFDDPNLIILPLAFGKRQGREFIWNDLLSLETGSLKLANGRVIEKTLYNRRTRQDEPALFVALTFERREVLDSSNIKPMNLIGVDRGENIPAVIALTDPEGCPLSRFKDSLGNPTHILRIGESYKEKQRTIQAKKEVEQRRAGGYSRKYASKAKNLADDMVRNTARDLLYYAVTQDAMLIFENLSRGFGRQGKRTFMAERQYTRMEDWLTAKLAYEGLPSKTYLSKTLAQYTSKTCSNCGFTITSADYDRVLEKLKKTATGWMTTINGKELKVEGQITYYNRYKRQNVVKDLSVELDRLSEESVNNDISSWTKGRSGEALSLLKKRFSHRPVQEKFVCLNCGFETHADEQAALNIARSWLFLRSQEYKKYQTNKTTGNTDKRAFVETWQSFYRKKLKEVWKPAV

SEQ ID NO: 9509 - protein, 979 aa, synthetic construct
QEIKRINGIRRRLVKDSNTKKAGKTRGPMKTLLVRVMTPDLRERLENLRKKPENIPQPISNTSRANLNKLLTDYTEMKKAILHVYWEEFQKDPVGLMSRVAQPASKKIDQNKLKPEMDEKGNLTTAGFACSQCGQPLFVYKLEQVSEKGKAYTNYFGRCNVAEHEKLILLAQLKPEKDSDEAVTYSLGKFGQRALDFYSIHVTKESTHPVKPLAQIAGNRYASGPVGKALSDACMGTIASFLSKYQDIIIEHQKVVKGNQKRLESLRELAGKENLEYPSVTLPPQPHTKEGVDAYNEVIARVRMWVNLNLWQKLKLSRDDAKPLLRLKGFPSFPLVERQANEVDWWDMVCNVKKLINEKKEDGKVFWQNLAGYKRQEALRPYLSSEEDRKKGKKFARYQLGDLLLHLEKKHGEDWGKVYDEAWERIDKKVEGLSKHIKLEEERRSEDAQSKAALTDWLRAKASFVIEGLKEADKDEFCRCELKLQKWYGDLRGKPFAIEAENSILDISGFSKQYNCAFIWQKDGVKKLNLYLIINYFKGGKLRFKKIKPEAFEANRFYTVINKKSGEIVPMEVNFNFDDPNLIILPLAFGKRQGREFIWNDLLSLETGSLKLANGRVIEKTLYNRRTRQDEPALFVALTFERREVLDSSNIKPMNLIGVDRGENIPAVIALTDPEGCPLSRFKDSLGNPTHILRIGESYKEKQRTIQAKKEVEQRRAGGYSRKYASKAKNLADDMVRNTARDLLYYAVTQDAMLIFENLSRGFGRQGKRTFMAERQYTRMEDWLTAKLAYEGLPSKTYLSKTLAQYTSKTCSNCGFTITSADYDRVLEKLKKTATGWMTTINGKELKVEGQITYYNRYKRQNVVKDLSVELDRLSEESVNNDISSWTKGRSGEALSLLKKRFSHRPVQEKFVCLNCGFETHADEQAALNIARSWLFLRSQEYKKYQTNKTTGNTDKRAFVETWQSFYRKKLKEVWKPAV

SEQ ID NO: 9510 - protein, 979 aa, synthetic construct
QEIGKRINGIRRRLVKDSNTKKAGKTGPMKTLLVRVMTPDLRERLENLRKKPENIPQPISNTSRANLNKLLTDYTEMKKAILHVYWEEFQKDPVGLMSRVAQPASKKIDQNKLKPEMDEKGNLTTAGFACSQCGQPLFVYKLEQVSEKGKAYTNYFGRCNVAEHEKLILLAQLKPEKDSDEAVTYSLGKFGQRALDFYSIHVTKESTHPVKPLAQIAGNRYASGPVGKALSDACMGTIASFLSKYQDIIIEHQKVVKGNQKRLESLRELAGKENLEYPSVTLPPQPHTKEGVDAYNEVIARVRMWVNLNLWQKLKLSRDDAKPLLRLKGFPSFPLVERQANEVDWWDMVCNVKKLINEKKEDGKVFWQNLAGYKRQEALRPYLSSEEDRKKGKKFARYQLGDLLLHLEKKHGEDWGKVYDEAWERIDKKVEGLSKHIKLEEERRSEDAQSKAALTDWLRAKASFVIEGLKEADKDEFCRCELKLQKWYGDLRGKPFAIEAENSILDISGFSKQYNCAFIWQKDGVKKLNLYLIINYFKGGKLRFKKIKPEAFEANRFYTVINKKSGEIVPMEVNFNFDDPNLIILPLAFGKRQGREFIWNDLLSLETGSLKLANGRVIEKTLYNRRTRQDEPALFVALTFERREVLDSSNIKPMNLIGVDRGENIPAVIALTDPEGCPLSRFKDSLGNPTHILRIGESYKEKQRTIQAKKEVEQRRAGGYSRKYASKAKNLADDMVRNTARDLLYYAVTQDAMLIFENLSRGFGRQGKRTFMAERQYTRMEDWLTAKLAYEGLPSKTYLSKTLAQYTSKTCSNCGFTITSADYDRVLEKLKKTATGWMTTINGKELKVEGQITYYNRYKRQNVVKDLSVELDRLSEESVNNDISSWTKGRSGEALSLLKKRFSHRPVQEKFVCLNCGFETHADEQAALNIARSWLFLRSQEYKKYQTNKTTGNTDKRAFVETWQSFYRKKLKEVWKPAV

SEQ ID NO: 9511 - protein, 979 aa, synthetic construct
QEGGKRINKIRRRLVKDSNTKKAGKTGPMKTLLVRVMTPDLRERLENLRKKPENIPQPISNTSRANLNKLLTDYTEMKKAILHVYWEEFQKDPVGLMSRVAQPASKKIDQNKLKPEMDEKGNLTTAGFACSQCGQPLFVYKLEQVSEKGKAYTNYFGRCNVAEHEKLILLAQLKPEKDSDEAVTYSLGKFGQRALDFYSIHVTKESTHPVKPLAQIAGNRYASGPVGKALSDACMGTIASFLSKYQDIIIEHQKVVKGNQKRLESLRELAGKENLEYPSVTLPPQPHTKEGVDAYNEVIARVRMWVNLNLWQKLKLSRDDAKPLLRLKGFPSFPLVERQANEVDWWDMVCNVKKLINEKKEDGKVFWQNLAGYKRQEALRPYLSSEEDRKKGKKFARYQLGDLLLHLEKKHGEDWGKVYDEAWERIDKKVEGLSKHIKLEEERRSEDAQSKAALTDWLRAKASFVIEGLKEADKDEFCRCELKLQKWYGDLRGKPFAIEAENSILDISGFSKQYNCAFIWQKDGVKKLNLYLIINYFKGGKLRFKKIKPEAFEANRFYTVINKKSGEIVPMEVNFNFDDPNLIILPLAFGKRQGREFIWNDLLSLETGSLKLANGRVIEKTLYNRRTRQDEPALFVALTFERREVLDSSNIKPMNLIGVDRGENIPAVIALTDPEGCPLSRFKDSLGNPTHILRIGESYKEKQRTIQAKKEVEQRRAGGYSRKYASKAKNLADDMVRNTARDLLYYAVTQDAMLIFENLSRGFGRQGKRTFMAERQYTRMEDWLTAKLAYEGLPSKTYLSKTLAQYTSKTCSNCGFTITSADYDRVLEKLKKTATGWMTTINGKELKVEGQITYYNRYKRQNVVKDLSVELDRLSEESVNNDISSWTKGRSGEALSLLKKRFSHRPVQEKFVCLNCGFETHADEQAALNIARSWLFLRSQEYKKYQTNKTTGNTDKRAFVETWQSFYRKKLKEVWKPAV

SEQ ID NO: 9512 - protein, 978 aa, synthetic construct
QEIKRINKIRRRLVKDSNTKKAGKTGPMKTLLVRVMTPDLRERLENLRKKPENIPQPISNTSRANLNKLLTDYTEMKKAILHVYWEEFQKDPVGLMSRVAQPASKKIDQNKLKPEMDEKGNLTTAGFACSQCGQPLFVYKLEQVSEKGKAYTNYFGRCNVAEHEKLILLAQLKPEKDSDEAVTYSLGKFGQRALDFYSIHVTKESTHPVKPLAQIAGNRYASGPVGKALSDACMGTIASFLSKYQDIIIEHQKVVKGNQKRLESLRELAGKENLEYPSVTLPPQPHTKEGVDAYNEVIARVRMWVNLNLWQKLKLSRDDAKPLLRLKGFPSFPLVERQANEVDWWDMVCNVKKLINEKKEDGKVFWQNLAGYKRQEALRPYLSSEEDRKKGKKFARYQLGDLLLHLEKKHGEDWGKVYDEAWERIDKKVEGLSKHIKLEEERRSEDAQSKAALTDWLRAKASFVIEGLKEADKDEFCRCELKLQKWYGDLRGKPFAIEAENSILDISGFSKQYNCAFIWQKDGVKKLNLYLIINYFKGGKLRFKKIKPEAFEANRFYTVINKKSGEIVPMEVNFNFDDPNLIILPLAFGKRQGREFIWNDLLSLETGSLKLANGRVIEKTLYNRRTRQDEPALFVALTFERREVLDSSNIKPMNLIGVDRGENIPAVIALTDPEGCPLSRFKDSLGNPTHILRIGESYKEKQRTIQAKKEVEQRRAGGYSRKYASKAKNLADDMVRNTARDLLYYAVTQDAMLIFENLSRGFGRQGKRTFMAERQYTRMEDWLTAKLAYEGLPSKTYLSKTLAQYTSKTCSNCGFTITSADYDRMLEKLKKTATGWMTTINGKELKVEGQITYYNRYKRQNVVKDLSVELDRLSEESVNNDISSWDKGRSGEALSLLKKRFSHRPVQEKFVCLNCGFETHADEQAALNIARSWLFLRSQEYKKYQTNKTTGNTDKRAFVETWQSFYRKKLKEVWKPAV

SEQ ID NO: 9513 - protein, 978 aa, synthetic construct
QEIKRINKIRRRLVKDSNTKKAGKTGPMKTLLVRVMTPDLRERLENLRKKPENIPQPISNTSRANLNKLLTDYTEMKKAILHVYWEEFQKDPVGLMSRVAQPASKKIDQNKLKPEMDEKGNLTTAGFACSQCGQPLFVYKLEQVSEKGKAYTNYFGRCNVAEHEKLILLAQLKPEKDSDEAVTYSLGKFGQRALDFYSIHVTKESTHPVKPLAQIAGNRYASGPVGKALSDACMGTIASFLSKYQDIIIEHQKVVKGNQKRLESLRELAGKENLEYPSVTLPPQPHTKEGVDAYNEVIARVRMWVNLNLWQKLKLSRDDAKPLLRLKGFPSFPLVERQANEVDWWDMVCNVKKLINEKKEDGKVFWQNLAGYKRQEALRPYLSSEEDRKKGKKFARYQLGDLLLHLEKKHGEDWGKVYDEAWERIDKKVEGLSKHIKLEEERRSEDAQSKAALTDWLRAKASFVIEGLKEADKDEFCRCELKLQKWYGDLRGKPFAIEAENSILDISGFSKQYNCAFIWQKDGVKKLNLYLIINYFKGGKLRFKKIKPEAFEANRFYTVINKKSGEIVPMEVNFNFDDPNLIILPLAFGKRQGREFIWNDLLSLETGSLKLANGRVIEKTLYNRRTRQDEPALFVALTFERREVLDSSNIKPMNLIGVDRGENIPAVIALTDPEGCPLSRFKDSLGNPTHILRIGESYKEKQRTIQAKKEVEQRRAGGYSRKYASKAKNLADDMVRNTARDLLYYAVTQDAMLIFENLSRGFGRQGKRTFMAERQYTRMEDWLTAKLAYEGLPSKTYLSKTLAQYTSKTCSNCGFTITSADYDRMLEKLKKTATGWMTTINGKELKVEGQITYYNRYKRQNVVKDLSVELDRLSEESVNNDISSWTKGRQGEALSLLKKRFSHRPVQEKFVCLNCGFETHADEQAALNIARSWLFLRSQEYKKYQTNKTTGNTDKRAFVETWQSFYRKKLKEVWKPAV

SEQ ID NO: 9514 - protein, 979 aa, synthetic construct
QEIGRINKIRRRLVKDSNTKKAGKTRGPMKTLLVRVMTPDLRERLENLRKKPENIPQPISNTSRANLNKLLTDYTEMKKAILHVYWEEFQKDPVGLMSRVAQPASKKIDQNKLKPEMDEKGNLTTAGFACSQCGQPLFVYKLEQVSEKGKAYTNYFGRCNVAEHEKLILLAQLKPEKDSDEAVTYSLGKFGQRALDFYSIHVTKESTHPVKPLAQIAGNRYASGPVGKALSDACMGTIASFLSKYQDIIIEHQKVVKGNQKRLESLRELAGKENLEYPSVTLPPQPHTKEGVDAYNEVIARVRMWVNLNLWQKLKLSRDDAKPLLRLKGFPSFPLVERQANEVDWWDMVCNVKKLINEKKEDGKVFWQNLAGYKRQEALRPYLSSEEDRKKGKKFARYQLGDLLLHLEKKHGEDWGKVYDEAWERIDKKVEGLSKHIKLEEERRSEDAQSKAALTDWLRAKASFVIEGLKEADKDEFCRCELKLQKWYGDLRGKPFAIEAENSILDISGFSKQYNCAFIWQKDGVKKLNLYLIINYFKGGKLRFKKIKPEAFEANRFYTVINKKSGEIVPMEVNFNFDDPNLIILPLAFGKRQGREFIWNDLLSLETGSLKLANGRVIEKTLYNRRTRQDEPALFVALTFERREVLDSSNIKPMNLIGVDRGENIPAVIALTDPEGCPLSRFKDSLGNPTHILRIGESYKEKQRTIQAKKEVEQRRAGGYSRKYASKAKNLADDMVRNTARDLLYYAVTQDAMLIFENLSRGFGRQGKRTFMAERQYTRMEDWLTAKLAYEGLPSKTYLSKTLAQYTSKTCSNCGFTITSADYDRVLEKLKKTATGWMTTINGKELKVEGQITYYNRYKRQNVVKDLSVELDRLSEESVNNDISSWTKGRSGEALSLLKKRFSHRPVQEKFVCLNCGFETHADEQAALNIARSWLFLRSQEYKKYQTNKTTGNTDKRAFVETWQSFYRKKLKEVWKPAV

SEQ ID NO: 9515 - protein, 978 aa, synthetic construct
QEIGRINKIRRRLVKDSNTKKAGKTGPMKTLLVRVMTPDLRERLENLRKKPENIPQPISNTSRANLNKLLTDYTEMKKAILHVYWEEFQKDPVGLMSRVAQPASKKIDQNKLKPEMDEKGNLTTAGFACSQCGQPLFVYKLEQVSEKGKAYTNYFGRCNVAEHEKLIKLAQLKPEKDSDEAVTYSLGKFGQRALDFYSIHVTKESTHPVKPLAQIAGNRYASGPVGKALSDACMGTIASFLSKYQDIIIEHQKVVKGNQKRLESLRELAGKENLEYPSVTLPPQPHTKEGVDAYNEVIARVRMWVNLNLWQKLKLSRDDAKPLLRLKGFPSFPLVERQANEVDWWDMVCNVKKLINEKKEDGKVFWQNLAGYKRQEALRPYLSSEEDRKKGKKFARYQLGDLLLHLEKKHGEDWGKVYDEAWERIDKKVEGLSKHIKLEEERRSEDAQSKAALTDWLRAKASFVIEGLKEADKDEFCRCELKLQKWYGDLRGKPFAIEAENSILDISGFSKQYNCAFIWQKDGVKKLNLYLIINYFKGGKLRFKKIKPEAFEANRFYTVINKKSGEIVPMEVNFNFDDPNLIILPLAFGKRQGREFIWNDLLSLETGSLKLANGRVIEKTLYNRRTRQDEPALFVALTFERREVLDSSNIKPMNLIGVDRGENIPAVIALTDPEGCPLSRFKDSLGNPTHILRIGESYKEKQRTIQAKKEVEQRRAGGYSRKYASKAKNLADDMVRNTARDLLYYAVTQDAMLIFENLSRGFGRQGKRTFMAERQYTRMEDWLTAKLAYEGLPSKTYLSKTLAQYTSKTCSNCGFTITSADYDRVLEKLKKTATGWMTTINGKELKVEGQITYYNRYKRQNVVKDLSVELDRLSEESVNNDISSWTKGRSGEALSLLKKRFSHRPVQEKFVCLNCGFETHADEQAALNIARSWLFLRSQEYKKYQTNKTTGNTDKRAFVETWQSFYRKKLKEVWKPAV

SEQ ID NO: 9516 - protein, 978 aa, synthetic construct
QEIGRINKIRRRLVKDSNTKKAGKTGPMKTLLVRVMTPDLRERLENLRKKPENIPQPISNTSRANLNKLLTDYTEMKKAILHVYWEEFQKDPVGLMSRVAQPASKKIDQNKLKPEMDEKGNLTTAGFACSQCGQPLFVYKLEQVSEKGKAYTNYFGRCNVAEHEKLILLDQLKPEKDSDEAVTYSLGKFGQRALDFYSIHVTKESTHPVKPLAQIAGNRYASGPVGKALSDACMGTIASFLSKYQDIIIEHQKVVKGNQKRLESLRELAGKENLEYPSVTLPPQPHTKEGVDAYNEVIARVRMWVNLNLWQKLKLSRDDAKPLLRLKGFPSFPLVERQANEVDWWDMVCNVKKLINEKKEDGKVFWQNLAGYKRQEALRPYLSSEEDRKKGKKFARYQLGDLLLHLEKKHGEDWGKVYDEAWERIDKKVEGLSKHIKLEEERRSEDAQSKAALTDWLRAKASFVIEGLKEADKDEFCRCELKLQKWYGDLRGKPFAIEAENSILDISGFSKQYNCAFIWQKDGVKKLNLYLIINYFKGGKLRFKKIKPEAFEANRFYTVINKKSGEIVPMEVNFNFDDPNLIILPLAFGKRQGREFIWNDLLSLETGSLKLANGRVIEKTLYNRRTRQDEPALFVALTFERREVLDSSNIKPMNLIGVDRGENIPAVIALTDPEGCPLSRFKDSLGNPTHILRIGESYKEKQRTIQAKKEVEQRRAGGYSRKYASKAKNLADDMVRNTARDLLYYAVTQDAMLIFENLSRGFGRQGKRTFMAERQYTRMEDWLTAKLAYEGLPSKTYLSKTLAQYTSKTCSNCGFTITSADYDRVLEKLKKTATGWMTTINGKELKVEGQITYYNRYKRQNVVKDLSVELDRLSEESVNNDISSWTKGRSGEALSLLKKRFSHRPVQEKFVCLNCGFETHADEQAALNIARSWLFLRSQEYKKYQTNKTTGNTDKRAFVETWQSFYRKKLKEVWKPAV

SEQ ID NO: 9517 - protein, 978 aa, synthetic construct
QEIGRINKIRRRLVKDSNTKKAGKTGPMKTLLVRVMTPDLRERLENLRKKPENIPQPISNTSRANLNKLLTDYTEMKKAILHVYWEEFQKDPVGLMSRVAQPASKKIDQNKLKPEMDEKGNLTTAGFACSQCGQPLFVYKLEQVSEKGKAYTNYFGRCNVAEHEKLILLAQLKPEKDSDEAVTYSLGKFGQRALDFYSIHVTKESTHPVKPLAQIAGNRYASGPVGKALSDACMGTIASFLSKYQDIIIEHQKVVKGNQKRLESLRELAGKENLEYPSVTLPPQPHTKEGVDAYNEVIARVRTWVNLNLWQKLKLSRDDAKPLLRLKGFPSFPLVERQANEVDWWDMVCNVKKLINEKKEDGKVFWQNLAGYKRQEALRPYLSSEEDRKKGKKFARYQLGDLLLHLEKKHGEDWGKVYDEAWERIDKKVEGLSKHIKLEEERRSEDAQSKAALTDWLRAKASFVIEGLKEADKDEFCRCELKLQKWYGDLRGKPFAIEAENSILDISGFSKQYNCAFIWQKDGVKKLNLYLIINYFKGGKLRFKKIKPEAFEANRFYTVINKKSGEIVPMEVNFNFDDPNLIILPLAFGKRQGREFIWNDLLSLETGSLKLANGRVIEKTLYNRRTRQDEPALFVALTFERREVLDSSNIKPMNLIGVDRGENIPAVIALTDPEGCPLSRFKDSLGNPTHILRIGESYKEKQRTIQAKKEVEQRRAGGYSRKYASKAKNLADDMVRNTARDLLYYAVTQDAMLIFENLSRGFGRQGKRTFMAERQYTRMEDWLTAKLAYEGLPSKTYLSKTLAQYTSKTCSNCGFTITSADYDRVLEKLKKTATGWMTTINGKELKVEGQITYYNRYKRQNVVKDLSVELDRLSEESVNNDISSWTKGRSGEALSLLKKRFSHRPVQEKFVCLNCGFETHADEQAALNIARSWLFLRSQEYKKYQTNKTTGNTDKRAFVETWQSFYRKKLKEVWKPAV

SEQ ID NO: 9518 - protein, 978 aa, synthetic construct
QEIGRINKIRRRLVKDSNTKKAGKTGPMKTLLVRVMTPDLRERLENLRKKPENIPQPISNTSRANLNKLLTDYTEMKKAILHVYWEEFQKDPVGLMSRVAQPASKKIDQNKLKPEMDEKGNLTTAGFACSQCGQPLFVYKLEQVSEKGKAYTNYFGRCNVAEHEKLILLAQLKPEKDSDEAVTYSLGKFGQRALDFYSIHVTKESTHPVKPLAQIAGNRYASGPVGKALSDACMGTIASFLSKYQDIIIEHQKVVKGNQKRLESLRELAGKENLEYPSVTLPPQPHTKEGVDAYNEVIARVRMWVNLNLWQKLKLSRDDAKPLLRLKGFPSFPLVERQANEVDWWDMVCNVKKLINEKKEDGKVFWQNLAGYKRQEALRPYLSSEEDRKKGKKFARTQLGDLLLHLEKKHGEDWGKVYDEAWERIDKKVEGLSKHIKLEEERRSEDAQSKAALTDWLRAKASFVIEGLKEADKDEFCRCELKLQKWYGDLRGKPFAIEAENSILDISGFSKQYNCAFIWQKDGVKKLNLYLIINYFKGGKLRFKKIKPEAFEANRFYTVINKKSGEIVPMEVNFNFDDPNLIILPLAFGKRQGREFIWNDLLSLETGSLKLANGRVIEKTLYNRRTRQDEPALFVALTFERREVLDSSNIKPMNLIGVDRGENIPAVIALTDPEGCPLSRFKDSLGNPTHILRIGESYKEKQRTIQAKKEVEQRRAGGYSRKYASKAKNLADDMVRNTARDLLYYAVTQDAMLIFENLSRGFGRQGKRTFMAERQYTRMEDWLTAKLAYEGLPSKTYLSKTLAQYTSKTCSNCGFTITSADYDRVLEKLKKTATGWMTTINGKELKVEGQITYYNRYKRQNVVKDLSVELDRLSEESVNNDISSWTKGRSGEALSLLKKRFSHRPVQEKFVCLNCGFETHADEQAALNIARSWLFLRSQEYKKYQTNKTTGNTDKRAFVETWQSFYRKKLKEVWKPAV

SEQ ID NO: 9519 - protein, 978 aa, synthetic construct
QEIGRINKIRRRLVKDSNTKKAGKTGPMKTLLVRVMTPDLRERLENLRKKPENIPQPISNTSRANLNKLLTDYTEMKKAILHVYWEEFQKDPVGLMSRVAQPASKKIDQNKLKPEMDEKGNLTTAGFACSQCGQPLFVYKLEQVSEKGKAYTNYFGRCNVAEHEKLILLAQLKPEKDSDEAVTYSLGKFGQRALDFYSIHVTKESTHPVKPLAQIAGNRYASGPVGKALSDACMGTIASFLSKYQDIIIEHQKVVKGNQKRLESLRELAGKENLEYPSVTLPPQPHTKEGVDAYNEVIARVRMWVNLNLWQKLKLSRDDAKPLLRLKGFPSFPLVERQANEVDWWDMVCNVKKLINEKKEDGKVFWQNLAGYKRQEALRPYLSSEEDRKKGKKFARYQLGDLLLHLEKKHGEDWGKVYDEAWERIDKKVEGLSKHIKLEEERRSEDAQSKAALTDWLRAKASFVIEGLKEADKDEFCRCELKLQKWYGDLRGKPFAIEAENSILDISGFSKQYNCAFIWQKDGVKKLNLYLIINYFKGGKLRFKKIKPEAFEANRFYTVINKKSGEIVPMEVNFNFDDPNLIILPLAFGKRQGREFIWNDLLSLETGSLKLANGRVIEKTLYNRRTRQDEPALFVALTFERREVLDSSNIKPMNLIGVDRGENIPAVIALTDPEGCPLSRFKDSLGNPTHILRIGESYKEKQRTIQAKKEVEQRRAGGYSRKYASKAKNLADDMVRNTARDLLYYAVTQDAMLIFENLSRGFGRQGKRTFMAERQYTRMEDWLTAKLAYEGLPSKTYLSKTLAQYTSKTCSNCGFTITSADYDRVLEKLKKTATGWMTTINGKELKVEGQITYYNRYKRQNVVKDLSVELDRLSEESVNNDISSWTKGRQGEALSLLKKRFSHRPVQEKFVCLNCGFETHADEQAALNIARSWLFLRSQEYKKYQTNKTTGNTDKRAFVETWQSFYRKKLKEVWKPAV

SEQ ID NO: 9520 - protein, 982 aa, synthetic construct
QEIKGRINKIRRRLVKDSNTKKAGKTRKTGPMKTLLVRVMTPDLRERLENLRKKPENIPQPISNTSRANLNKLLTDYTEMKKAILHVYWEEFQKDPVGLMSRVAQPASKKIDQNKLKPEMDEKGNLTTAGFACSQCGQPLFVYKLEQVSEKGKAYTNYFGRCNVAEHEKLILLAQLKPEKDSDEAVTYSLGKFGQRALDFYSIHVTKESTHPVKPLAQIAGNRYASGPVGKALSDACMGTIASFLSKYQDIIIEHQKVVKGNQKRLESLRELAGKENLEYPSVTLPPQPHTKEGVDAYNEVIARVRMWVNLNLWQKLKLSRDDAKPLLRLKGFPSFPLVERQANEVDWWDMVCNVKKLINEKKEDGKVFWQNLAGYKRQEALRPYLSSEEDRKKGKKFARYQLGDLLLHLEKKHGEDWGKVYDEAWERIDKKVEGLSKHIKLEEERRSEDAQSKAALTDWLRAKASFVIEGLKEADKDEFCRCELKLQKWYGDLRGKPFAIEAENSILDISGFSKQYNCAFIWQKDGVKKLNLYLIINYFKGGKLRFKKIKPEAFEANRFYTVINKKSGEIVPMEVNFNFDDPNLIILPLAFGKRQGREFIWNDLLSLETGSLKLANGRVIEKTLYNRRTRQDEPALFVALTFERREVLDSSNIKPMNLIGVDRGENIPAVIALTDPEGCPLSRFKDSLGNPTHILRIGESYKEKQRTIQAKKEVEQRRAGGYSRKYASKAKNLADDMVRNTARDLLYYAVTQDAMLIFENLSRGFGRQGKRTFMAERQYTRMEDWLTAKLAYEGLPSKTYLSKTLAQYTSKTCSNCGFTITSADYDRVLEKLKKTATGWMTTINGKELKVEGQITYYNRYKRQNVVKDLSVELDRLSEESVNNDISSWTKGRSGEALSLLKKRFSHRPVQEKFVCLNCGFETHADEQAALNIARSWLFLRSQEYKKYQTNKTTGNTDKRAFVETWQSFYRKKLKEVWKPAV

SEQ ID NO: 9521 - protein, 979 aa, synthetic construct
QEIKGRINKIRRRLVKDSNTKKAGKTGPMKTLLVRVMTPDLRERLENLRKKPENIPQPISNTSRANLNKLLTDYTEMKKAILHVYWEEFQKDPVGLMSRVAQPASKKIDQNKLKPEMDEKGNLTTAGFACSQCGQPLFVYKLEQVSEKGKAYTNYFGRCNVAEHEKLIKLAQLKPEKDSDEAVTYSLGKFGQRALDFYSIHVTKESTHPVKPLAQIAGNRYASGPVGKALSDACMGTIASFLSKYQDIIIEHQKVVKGNQKRLESLRELAGKENLEYPSVTLPPQPHTKEGVDAYNEVIARVRMWVNLNLWQKLKLSRDDAKPLLRLKGFPSFPLVERQANEVDWWDMVCNVKKLINEKKEDGKVFWQNLAGYKRQEALRPYLSSEEDRKKGKKFARYQLGDLLLHLEKKHGEDWGKVYDEAWERIDKKVEGLSKHIKLEEERRSEDAQSKAALTDWLRAKASFVIEGLKEADKDEFCRCELKLQKWYGDLRGKPFAIEAENSILDISGFSKQYNCAFIWQKDGVKKLNLYLIINYFKGGKLRFKKIKPEAFEANRFYTVINKKSGEIVPMEVNFNFDDPNLIILPLAFGKRQGREFIWNDLLSLETGSLKLANGRVIEKTLYNRRTRQDEPALFVALTFERREVLDSSNIKPMNLIGVDRGENIPAVIALTDPEGCPLSRFKDSLGNPTHILRIGESYKEKQRTIQAKKEVEQRRAGGYSRKYASKAKNLADDMVRNTARDLLYYAVTQDAMLIFENLSRGFGRQGKRTFMAERQYTRMEDWLTAKLAYEGLPSKTYLSKTLAQYTSKTCSNCGFTITSADYDRVLEKLKKTATGWMTTINGKELKVEGQITYYNRYKRQNVVKDLSVELDRLSEESVNNDISSWTKGRSGEALSLLKKRFSHRPVQEKFVCLNCGFETHADEQAALNIARSWLFLRSQEYKKYQTNKTTGNTDKRAFVETWQSFYRKKLKEVWKPAV

SEQ ID NO: 9522 - protein, 979 aa, synthetic construct
QEIKGRINKIRRRLVKDSNTKKAGKTGPMKTLLVRVMTPDLRERLENLRKKPENIPQPISNTSRANLNKLLTDYTEMKKAILHVYWEEFQKDPVGLMSRVAQPASKKIDQNKLKPEMDEKGNLTTAGFACSQCGQPLFVYKLEQVSEKGKAYTNYFGRCNVAEHEKLILLDQLKPEKDSDEAVTYSLGKFGQRALDFYSIHVTKESTHPVKPLAQIAGNRYASGPVGKALSDACMGTIASFLSKYQDIIIEHQKVVKGNQKRLESLRELAGKENLEYPSVTLPPQPHTKEGVDAYNEVIARVRMWVNLNLWQKLKLSRDDAKPLLRLKGFPSFPLVERQANEVDWWDMVCNVKKLINEKKEDGKVFWQNLAGYKRQEALRPYLSSEEDRKKGKKFARYQLGDLLLHLEKKHGEDWGKVYDEAWERIDKKVEGLSKHIKLEEERRSEDAQSKAALTDWLRAKASFVIEGLKEADKDEFCRCELKLQKWYGDLRGKPFAIEAENSILDISGFSKQYNCAFIWQKDGVKKLNLYLIINYFKGGKLRFKKIKPEAFEANRFYTVINKKSGEIVPMEVNFNFDDPNLIILPLAFGKRQGREFIWNDLLSLETGSLKLANGRVIEKTLYNRRTRQDEPALFVALTFERREVLDSSNIKPMNLIGVDRGENIPAVIALTDPEGCPLSRFKDSLGNPTHILRIGESYKEKQRTIQAKKEVEQRRAGGYSRKYASKAKNLADDMVRNTARDLLYYAVTQDAMLIFENLSRGFGRQGKRTFMAERQYTRMEDWLTAKLAYEGLPSKTYLSKTLAQYTSKTCSNCGFTITSADYDRVLEKLKKTATGWMTTINGKELKVEGQITYYNRYKRQNVVKDLSVELDRLSEESVNNDISSWTKGRSGEALSLLKKRFSHRPVQEKFVCLNCGFETHADEQAALNIARSWLFLRSQEYKKYQTNKTTGNTDKRAFVETWQSFYRKKLKEVWKPAV

SEQ ID NO: 9523 - protein, 979 aa, synthetic construct
QEIKGRINKIRRRLVKDSNTKKAGKTGPMKTLLVRVMTPDLRERLENLRKKPENIPQPISNTSRANLNKLLTDYTEMKKAILHVYWEEFQKDPVGLMSRVAQPASKKIDQNKLKPEMDEKGNLTTAGFACSQCGQPLFVYKLEQVSEKGKAYTNYFGRCNVAEHEKLILLAQLKPEKDSDEAVTYSLGKFGQRALDFYSIHVTKESTHPVKPLAQIAGNRYASGPVGKALSDACMGTIASFLSKYQDIIIEHQKVVKGNQKRLESLRELAGKENLEYPSVTLPPQPHTKEGVDAYNEVIARVRTWVNLNLWQKLKLSRDDAKPLLRLKGFPSFPLVERQANEVDWWDMVCNVKKLINEKKEDGKVFWQNLAGYKRQEALRPYLSSEEDRKKGKKFARYQLGDLLLHLEKKHGEDWGKVYDEAWERIDKKVEGLSKHIKLEEERRSEDAQSKAALTDWLRAKASFVIEGLKEADKDEFCRCELKLQKWYGDLRGKPFAIEAENSILDISGFSKQYNCAFIWQKDGVKKLNLYLIINYFKGGKLRFKKIKPEAFEANRFYTVINKKSGEIVPMEVNFNFDDPNLIILPLAFGKRQGREFIWNDLLSLETGSLKLANGRVIEKTLYNRRTRQDEPALFVALTFERREVLDSSNIKPMNLIGVDRGENIPAVIALTDPEGCPLSRFKDSLGNPTHILRIGESYKEKQRTIQAKKEVEQRRAGGYSRKYASKAKNLADDMVRNTARDLLYYAVTQDAMLIFENLSRGFGRQGKRTFMAERQYTRMEDWLTAKLAYEGLPSKTYLSKTLAQYTSKTCSNCGFTITSADYDRVLEKLKKTATGWMTTINGKELKVEGQITYYNRYKRQNVVKDLSVELDRLSEESVNNDISSWTKGRSGEALSLLKKRFSHRPVQEKFVCLNCGFETHADEQAALNIARSWLFLRSQEYKKYQTNKTTGNTDKRAFVETWQSFYRKKLKEVWKPAV

SEQ ID NO: 9524 - protein, 979 aa, synthetic construct
QEIKGRINKIRRRLVKDSNTKKAGKTGPMKTLLVRVMTPDLRERLENLRKKPENIPQPISNTSRANLNKLLTDYTEMKKAILHVYWEEFQKDPVGLMSRVAQPASKKIDQNKLKPEMDEKGNLTTAGFACSQCGQPLFVYKLEQVSEKGKAYTNYFGRCNVAEHEKLILLAQLKPEKDSDEAVTYSLGKFGQRALDFYSIHVTKESTHPVKPLAQIAGNRYASGPVGKALSDACMGTIASFLSKYQDIIIEHQKVVKGNQKRLESLRELAGKENLEYPSVTLPPQPHTKEGVDAYNEVIARVRMWVNLNLWQKLKLSRDDAKPLLRLKGFPSFPLVERQANEVDWWDMVCNVKKLINEKKEDGKVFWQNLAGYKRQEALRPYLSSEEDRKKGKKFARTQLGDLLLHLEKKHGEDWGKVYDEAWERIDKKVEGLSKHIKLEEERRSEDAQSKAALTDWLRAKASFVIEGLKEADKDEFCRCELKLQKWYGDLRGKPFAIEAENSILDISGFSKQYNCAFIWQKDGVKKLNLYLIINYFKGGKLRFKKIKPEAFEANRFYTVINKKSGEIVPMEVNFNFDDPNLIILPLAFGKRQGREFIWNDLLSLETGSLKLANGRVIEKTLYNRRTRQDEPALFVALTFERREVLDSSNIKPMNLIGVDRGENIPAVIALTDPEGCPLSRFKDSLGNPTHILRIGESYKEKQRTIQAKKEVEQRRAGGYSRKYASKAKNLADDMVRNTARDLLYYAVTQDAMLIFENLSRGFGRQGKRTFMAERQYTRMEDWLTAKLAYEGLPSKTYLSKTLAQYTSKTCSNCGFTITSADYDRVLEKLKKTATGWMTTINGKELKVEGQITYYNRYKRQNVVKDLSVELDRLSEESVNNDISSWTKGRSGEALSLLKKRFSHRPVQEKFVCLNCGFETHADEQAALNIARSWLFLRSQEYKKYQTNKTTGNTDKRAFVETWQSFYRKKLKEVWKPAV

SEQ ID NO: 9525 - protein, 979 aa, synthetic construct
QEIKGRINKIRRRLVKDSNTKKAGKTGPMKTLLVRVMTPDLRERLENLRKKPENIPQPISNTSRANLNKLLTDYTEMKKAILHVYWEEFQKDPVGLMSRVAQPASKKIDQNKLKPEMDEKGNLTTAGFACSQCGQPLFVYKLEQVSEKGKAYTNYFGRCNVAEHEKLILLAQLKPEKDSDEAVTYSLGKFGQRALDFYSIHVTKESTHPVKPLAQIAGNRYASGPVGKALSDACMGTIASFLSKYQDIIIEHQKVVKGNQKRLESLRELAGKENLEYPSVTLPPQPHTKEGVDAYNEVIARVRMWVNLNLWQKLKLSRDDAKPLLRLKGFPSFPLVERQANEVDWWDMVCNVKKLINEKKEDGKVFWQNLAGYKRQEALRPYLSSEEDRKKGKKFARYQLGDLLLHLEKKHGEDWGKVYDEAWERIDKKVEGLSKHIKLEEERRSEDAQSKAALTDWLRAKASFVIEGLKEADKDEFCRCELKLQKWYGDLRGKPFAIEAENSILDISGFSKQYNCAFIWQKDGVKKLNLYLIINYFKGGKLRFKKIKPEAFEANRFYTVINKKSGEIVPMEVNFNFDDPNLIILPLAFGKRQGREFIWNDLLSLETGSLKLANGRVIEKTLYNRRTRQDEPALFVALTFERREVLDSSNIKPMNLIGVDRGENIPAVIALTDPEGCPLSRFKDSLGNPTHILRIGESYKEKQRTIQAKKEVEQRRAGGYSRKYASKAKNLADDMVRNTARDLLYYAVTQDAMLIFENLSRGFGRQGKRTFMAERQYTRMEDWLTAKLAYEGLPSKTYLSKTLAQYTSKTCSNCGFTITSADYDRVLEKLKKTATGWMTTINGKELKVEGQITYYNRYKRQNVVKDLSVELDRLSEESVNNDISSWTKGRQGEALSLLKKRFSHRPVQEKFVCLNCGFETHADEQAALNIARSWLFLRSQEYKKYQTNKTTGNTDKRAFVETWQSFYRKKLKEVWKPAV

SEQ ID NO: 9526 - protein, 979 aa, synthetic construct
QEIKRINKIRRRLVKDSNTKKAGKTRGPMKTLLVRVMTPDLRERLENLRKKPENIPQPISNTSRANLNKLLTDYTEMKKAILHVYWEEFQKDPVGLMSRVAQPASKKIDQNKLKPEMDEKGNLTTAGFACSQCGQPLFVYKLEQVSEKGKAYTNYFGRCNVAEHEKLILLAQLKPEKDSDEAVTYSLGKFGQRALDFYSIHVTKESTHPVKPLAQIAGNRYASGPVGKALSDACMGTIASFLSKYQDIIIEHQKVVKGNQKRLESLRELAGKENLEYPSVTLPPQPHTKEGVDAYNEVIARVRWWVNLNLWQKLKLSRDDAKPLLRLKGFPSFPLVERQANEVDWWDMVCNVKKLINEKKEDGKVFWQNLAGYKRQEALRPYLSSEEDRKKGKKFARYQLGDLLLHLEKKHGEDWGKVYDEAWERIDKKVEGLSKHIKLEEERRSEDAQSKAALTDWLRAKASFVIEGLKEADKDEFCRCELKLQKWYGDLRGKPFAIEAENSILDISGFSKQYNCAFIWQKDGVKKLNLYLIINYFKGGKLRFKKIKPEAFEANRFYTVINKKSGEIVPMEVNFNFDDPNLIILPLAFGKRQGREFIWNDLLSLETGSLKLANGRVIEKTLYNRRTRQDEPALFVALTFERREVLDSSNIKPMNLIGVDRGENIPAVIALTDPEGCPLSRFKDSLGNPTHILRIGESYKEKQRTIQAKKEVEQRRAGGYSRKYASKAKNLADDMVRNTARDLLYYAVTQDAMLIFENLSRGFGRQGKRTFMAERQYTRMEDWLTAKLAYEGLPSKTYLSKTLAQYTSKTCSNCGFTITSADYDRVLEKLKKTATGWMTTINGKELKVEGQITYYNRYKRQNVVKDLSVELDRLSEESVNNDISSWTKGRSGEALSLLKKRFSHRPVQEKFVCLNCGFETHADEQAALNIARSWLFLRSQEYKKYQTNKTTGNTDKRAFVETWQSFYRKKLKEVWKPAV

SEQ ID NO: 9527 - protein, 978 aa, synthetic construct
QEIKRINKIRRRLVKDSNTKKAGKTGPMKTLLVRVMTPDLRERLENLRKKPENIPQPISNTSRANLNKLLTDYTEMKKAILHVYWEEFQKDPVGLMSRVAQPASKKIDQNKLKPEMDEKGNLTTAGFACSQCGQPLFVYKLEQVSEKGKAYTNYFGRCNVAEHEKLIKLAQLKPEKDSDEAVTYSLGKFGQRALDFYSIHVTKESTHPVKPLAQIAGNRYASGPVGKALSDACMGTIASFLSKYQDIIIEHQKVVKGNQKRLESLRELAGKENLEYPSVTLPPQPHTKEGVDAYNEVIARVRWWVNLNLWQKLKLSRDDAKPLLRLKGFPSFPLVERQANEVDWWDMVCNVKKLINEKKEDGKVFWQNLAGYKRQEALRPYLSSEEDRKKGKKFARYQLGDLLLHLEKKHGEDWGKVYDEAWERIDKKVEGLSKHIKLEEERRSEDAQSKAALTDWLRAKASFVIEGLKEADKDEFCRCELKLQKWYGDLRGKPFAIEAENSILDISGFSKQYNCAFIWQKDGVKKLNLYLIINYFKGGKLRFKKIKPEAFEANRFYTVINKKSGEIVPMEVNFNFDDPNLIILPLAFGKRQGREFIWNDLLSLETGSLKLANGRVIEKTLYNRRTRQDEPALFVALTFERREVLDSSNIKPMNLIGVDRGENIPAVIALTDPEGCPLSRFKDSLGNPTHILRIGESYKEKQRTIQAKKEVEQRRAGGYSRKYASKAKNLADDMVRNTARDLLYYAVTQDAMLIFENLSRGFGRQGKRTFMAERQYTRMEDWLTAKLAYEGLPSKTYLSKTLAQYTSKTCSNCGFTITSADYDRVLEKLKKTATGWMTTINGKELKVEGQITYYNRYKRQNVVKDLSVELDRLSEESVNNDISSWTKGRSGEALSLLKKRFSHRPVQEKFVCLNCGFETHADEQAALNIARSWLFLRSQEYKKYQTNKTTGNTDKRAFVETWQSFYRKKLKEVWKPAV

SEQ ID NO: 9528 - protein, 978 aa, synthetic construct
QEIKRINKIRRRLVKDSNTKKAGKTGPMKTLLVRVMTPDLRERLENLRKKPENIPQPISNTSRANLNKLLTDYTEMKKAILHVYWEEFQKDPVGLMSRVAQPASKKIDQNKLKPEMDEKGNLTTAGFACSQCGQPLFVYKLEQVSEKGKAYTNYFGRCNVAEHEKLILLDQLKPEKDSDEAVTYSLGKFGQRALDFYSIHVTKESTHPVKPLAQIAGNRYASGPVGKALSDACMGTIASFLSKYQDIIIEHQKVVKGNQKRLESLRELAGKENLEYPSVTLPPQPHTKEGVDAYNEVIARVRWWVNLNLWQKLKLSRDDAKPLLRLKGFPSFPLVERQANEVDWWDMVCNVKKLINEKKEDGKVFWQNLAGYKRQEALRPYLSSEEDRKKGKKFARYQLGDLLLHLEKKHGEDWGKVYDEAWERIDKKVEGLSKHIKLEEERRSEDAQSKAALTDWLRAKASFVIEGLKEADKDEFCRCELKLQKWYGDLRGKPFAIEAENSILDISGFSKQYNCAFIWQKDGVKKLNLYLIINYFKGGKLRFKKIKPEAFEANRFYTVINKKSGEIVPMEVNFNFDDPNLIILPLAFGKRQGREFIWNDLLSLETGSLKLANGRVIEKTLYNRRTRQDEPALFVALTFERREVLDSSNIKPMNLIGVDRGENIPAVIALTDPEGCPLSRFKDSLGNPTHILRIGESYKEKQRTIQAKKEVEQRRAGGYSRKYASKAKNLADDMVRNTARDLLYYAVTQDAMLIFENLSRGFGRQGKRTFMAERQYTRMEDWLTAKLAYEGLPSKTYLSKTLAQYTSKTCSNCGFTITSADYDRVLEKLKKTATGWMTTINGKELKVEGQITYYNRYKRQNVVKDLSVELDRLSEESVNNDISSWTKGRSGEALSLLKKRFSHRPVQEKFVCLNCGFETHADEQAALNIARSWLFLRSQEYKKYQTNKTTGNTDKRAFVETWQSFYRKKLKEVWKPAV

SEQ ID NO: 9529 - protein, 978 aa, synthetic construct
QEIKRINKIRRRLVKDSNTKKAGKTGPMKTLLVRVMTPDLRERLENLRKKPENIPQPISNTSRANLNKLLTDYTEMKKAILHVYWEEFQKDPVGLMSRVAQPASKKIDQNKLKPEMDEKGNLTTAGFACSQCGQPLFVYKLEQVSEKGKAYTNYFGRCNVAEHEKLILLAQLKPEKDSDEAVTYSLGKFGQRALDFYSIHVTKESTHPVKPLAQIAGNRYASGPVGKALSDACMGTIASFLSKYQDIIIEHQKVVKGNQKRLESLRELAGKENLEYPSVTLPPQPHTKEGVDAYNEVIARVRWWVNLNLWQKLKLSRDDAKPLLRLKGFPSFPLVERQANEVDWWDMVCNVKKLINEKKEDGKVFWQNLAGYKRQEALRPYLSSEEDRKKGKKFARTQLGDLLLHLEKKHGEDWGKVYDEAWERIDKKVEGLSKHIKLEEERRSEDAQSKAALTDWLRAKASFVIEGLKEADKDEFCRCELKLQKWYGDLRGKPFAIEAENSILDISGFSKQYNCAFIWQKDGVKKLNLYLIINYFKGGKLRFKKIKPEAFEANRFYTVINKKSGEIVPMEVNFNFDDPNLIILPLAFGKRQGREFIWNDLLSLETGSLKLANGRVIEKTLYNRRTRQDEPALFVALTFERREVLDSSNIKPMNLIGVDRGENIPAVIALTDPEGCPLSRFKDSLGNPTHILRIGESYKEKQRTIQAKKEVEQRRAGGYSRKYASKAKNLADDMVRNTARDLLYYAVTQDAMLIFENLSRGFGRQGKRTFMAERQYTRMEDWLTAKLAYEGLPSKTYLSKTLAQYTSKTCSNCGFTITSADYDRVLEKLKKTATGWMTTINGKELKVEGQITYYNRYKRQNVVKDLSVELDRLSEESVNNDISSWTKGRSGEALSLLKKRFSHRPVQEKFVCLNCGFETHADEQAALNIARSWLFLRSQEYKKYQTNKTTGNTDKRAFVETWQSFYRKKLKEVWKPAV

SEQ ID NO: 9530 - protein, 978 aa, synthetic construct
QEIKRINKIRRRLVKDSNTKKAGKTGPMKTLLVRVMTPDLRERLENLRKKPENIPQPISNTSRANLNKLLTDYTEMKKAILHVYWEEFQKDPVGLMSRVAQPASKKIDQNKLKPEMDEKGNLTTAGFACSQCGQPLFVYKLEQVSEKGKAYTNYFGRCNVAEHEKLILLAQLKPEKDSDEAVTYSLGKFGQRALDFYSIHVTKESTHPVKPLAQIAGNRYASGPVGKALSDACMGTIASFLSKYQDIIIEHQKVVKGNQKRLESLRELAGKENLEYPSVTLPPQPHTKEGVDAYNEVIARVRWWVNLNLWQKLKLSRDDAKPLLRLKGFPSFPLVERQANEVDWWDMVCNVKKLINEKKEDGKVFWQNLAGYKRQEALRPYLSSEEDRKKGKKFARYQLGDLLLHLEKKHGEDWGKVYDEAWERIDKKVEGLSKHIKLEEERRSEDAQSKAALTDWLRAKASFVIEGLKEADKDEFCRCELKLQKWYGDLRGKPFAIEAENSILDISGFSKQYNCAFIWQKDGVKKLNLYLIINYFKGGKLRFKKIKPEAFEANRFYTVINKKSGEIVPMEVNFNFDDPNLIILPLAFGKRQGREFIWNDLLSLETGSLKLANGRVIEKTLYNRRTRQDEPALFVALTFERREVLDSSNIKPMNLIGVDRGENIPAVIALTDPEGCPLSRFKDSLGNPTHILRIGESYKEKQRTIQAKKEVEQRRAGGYSRKYASKAKNLADDMVRNTARDLLYYAVTQDAMLIFENLSRGFGRQGKRTFMAERQYTRMEDWLTAKLAYEGLPSKTYLSKTLAQYTSKTCSNCGFTITSADYDRVLEKLKKTATGWMTTINGKELKVEGQITYYNRYKRQNVVKDLSVELDRLSEESVNNDISSWTKGRQGEALSLLKKRFSHRPVQEKFVCLNCGFETHADEQAALNIARSWLFLRSQEYKKYQTNKTTGNTDKRAFVETWQSFYRKKLKEVWKPAV

SEQ ID NO: 9531 - protein, 979 aa, synthetic construct
QEIKRINKIRRRLVKDSNTKKAGKTRGPMKTLLVRVMTPDLRERLENLRKKPENIPQPISNTSRANLNKLLTDYTEMKKAILHVYWEEFQKDPVGLMSRVAQPASKKIDQNKLKPEMDEKGNLTTAGFACSQCGQPLFVYKLEQVSEKGKAYTNYFGRCNVAEHEKLILLAQLKPEKDSDEAVTYSLGKFGQRALDFYSIHVTKESTHPVKPLAQIAGNRYASGPVGKALSDACMGTIASFLSKYQDIIIEHQKVVKGNQKRLESLRELAGKENLEYPSVTLPPQPHTKEGVDAYNEVIARVRMWVNLNLWQKLKLSRDDAKPLLRLKGFPSFPLVERQANEVDWWDMVCNVKKLINEKKEDGKVFWQNLAGYKRQEALRPYLSSEEDRKKGKKFARYQLGDLLLHLEKKHGEDWGKVYDEAWERIDKKVEGLSKHIKLEEERRSEDAQSKAALTDWLRAKASFVIEGLKEADKDEFCRCDLKLQKWYGDLRGKPFAIEAENSILDISGFSKQYNCAFIWQKDGVKKLNLYLIINYFKGGKLRFKKIKPEAFEANRFYTVINKKSGEIVPMEVNFNFDDPNLIILPLAFGKRQGREFIWNDLLSLETGSLKLANGRVIEKTLYNRRTRQDEPALFVALTFERREVLDSSNIKPMNLIGVDRGENIPAVIALTDPEGCPLSRFKDSLGNPTHILRIGESYKEKQRTIQAKKEVEQRRAGGYSRKYASKAKNLADDMVRNTARDLLYYAVTQDAMLIFENLSRGFGRQGKRTFMAERQYTRMEDWLTAKLAYEGLPSKTYLSKTLAQYTSKTCSNCGFTITSADYDRVLEKLKKTATGWMTTINGKELKVEGQITYYNRYKRQNVVKDLSVELDRLSEESVNNDISSWTKGRSGEALSLLKKRFSHRPVQEKFVCLNCGFETHADEQAALNIARSWLFLRSQEYKKYQTNKTTGNTDKRAFVETWQSFYRKKLKEVWKPAV

SEQ ID NO: 9532 - protein, 978 aa, synthetic construct
QEIKRINKIRRRLVKDSNTKKAGKTGPMKTLLVRVMTPDLRERLENLRKKPENIPQPISNTSRANLNKLLTDYTEMKKAILHVYWEEFQKDPVGLMSRVAQPASKKIDQNKLKPEMDEKGNLTTAGFACSQCGQPLFVYKLEQVSEKGKAYTNYFGRCNVAEHEKLIKLAQLKPEKDSDEAVTYSLGKFGQRALDFYSIHVTKESTHPVKPLAQIAGNRYASGPVGKALSDACMGTIASFLSKYQDIIIEHQKVVKGNQKRLESLRELAGKENLEYPSVTLPPQPHTKEGVDAYNEVIARVRMWVNLNLWQKLKLSRDDAKPLLRLKGFPSFPLVERQANEVDWWDMVCNVKKLINEKKEDGKVFWQNLAGYKRQEALRPYLSSEEDRKKGKKFARYQLGDLLLHLEKKHGEDWGKVYDEAWERIDKKVEGLSKHIKLEEERRSEDAQSKAALTDWLRAKASFVIEGLKEADKDEFCRCDLKLQKWYGDLRGKPFAIEAENSILDISGFSKQYNCAFIWQKDGVKKLNLYLIINYFKGGKLRFKKIKPEAFEANRFYTVINKKSGEIVPMEVNFNFDDPNLIILPLAFGKRQGREFIWNDLLSLETGSLKLANGRVIEKTLYNRRTRQDEPALFVALTFERREVLDSSNIKPMNLIGVDRGENIPAVIALTDPEGCPLSRFKDSLGNPTHILRIGESYKEKQRTIQAKKEVEQRRAGGYSRKYASKAKNLADDMVRNTARDLLYYAVTQDAMLIFENLSRGFGRQGKRTFMAERQYTRMEDWLTAKLAYEGLPSKTYLSKTLAQYTSKTCSNCGFTITSADYDRVLEKLKKTATGWMTTINGKELKVEGQITYYNRYKRQNVVKDLSVELDRLSEESVNNDISSWTKGRSGEALSLLKKRFSHRPVQEKFVCLNCGFETHADEQAALNIARSWLFLRSQEYKKYQTNKTTGNTDKRAFVETWQSFYRKKLKEVWKPAV

SEQ ID NO: 9533 - protein, 978 aa, synthetic construct
QEIKRINKIRRRLVKDSNTKKAGKTGPMKTLLVRVMTPDLRERLENLRKKPENIPQPISNTSRANLNKLLTDYTEMKKAILHVYWEEFQKDPVGLMSRVAQPASKKIDQNKLKPEMDEKGNLTTAGFACSQCGQPLFVYKLEQVSEKGKAYTNYFGRCNVAEHEKLILLDQLKPEKDSDEAVTYSLGKFGQRALDFYSIHVTKESTHPVKPLAQIAGNRYASGPVGKALSDACMGTIASFLSKYQDIIIEHQKVVKGNQKRLESLRELAGKENLEYPSVTLPPQPHTKEGVDAYNEVIARVRMWVNLNLWQKLKLSRDDAKPLLRLKGFPSFPLVERQANEVDWWDMVCNVKKLINEKKEDGKVFWQNLAGYKRQEALRPYLSSEEDRKKGKKFARYQLGDLLLHLEKKHGEDWGKVYDEAWERIDKKVEGLSKHIKLEEERRSEDAQSKAALTDWLRAKASFVIEGLKEADKDEFCRCDLKLQKWYGDLRGKPFAIEAENSILDISGFSKQYNCAFIWQKDGVKKLNLYLIINYFKGGKLRFKKIKPEAFEANRFYTVINKKSGEIVPMEVNFNFDDPNLIILPLAFGKRQGREFIWNDLLSLETGSLKLANGRVIEKTLYNRRTRQDEPALFVALTFERREVLDSSNIKPMNLIGVDRGENIPAVIALTDPEGCPLSRFKDSLGNPTHILRIGESYKEKQRTIQAKKEVEQRRAGGYSRKYASKAKNLADDMVRNTARDLLYYAVTQDAMLIFENLSRGFGRQGKRTFMAERQYTRMEDWLTAKLAYEGLPSKTYLSKTLAQYTSKTCSNCGFTITSADYDRVLEKLKKTATGWMTTINGKELKVEGQITYYNRYKRQNVVKDLSVELDRLSEESVNNDISSWTKGRSGEALSLLKKRFSHRPVQEKFVCLNCGFETHADEQAALNIARSWLFLRSQEYKKYQTNKTTGNTDKRAFVETWQSFYRKKLKEVWKPAV

SEQ ID NO: 9534 - protein, 978 aa, synthetic construct
QEIKRINKIRRRLVKDSNTKKAGKTGPMKTLLVRVMTPDLRERLENLRKKPENIPQPISNTSRANLNKLLTDYTEMKKAILHVYWEEFQKDPVGLMSRVAQPASKKIDQNKLKPEMDEKGNLTTAGFACSQCGQPLFVYKLEQVSEKGKAYTNYFGRCNVAEHEKLILLAQLKPEKDSDEAVTYSLGKFGQRALDFYSIHVTKESTHPVKPLAQIAGNRYASGPVGKALSDACMGTIASFLSKYQDIIIEHQKVVKGNQKRLESLRELAGKENLEYPSVTLPPQPHTKEGVDAYNEVIARVRTWVNLNLWQKLKLSRDDAKPLLRLKGFPSFPLVERQANEVDWWDMVCNVKKLINEKKEDGKVFWQNLAGYKRQEALRPYLSSEEDRKKGKKFARYQLGDLLLHLEKKHGEDWGKVYDEAWERIDKKVEGLSKHIKLEEERRSEDAQSKAALTDWLRAKASFVIEGLKEADKDEFCRCDLKLQKWYGDLRGKPFAIEAENSILDISGFSKQYNCAFIWQKDGVKKLNLYLIINYFKGGKLRFKKIKPEAFEANRFYTVINKKSGEIVPMEVNFNFDDPNLIILPLAFGKRQGREFIWNDLLSLETGSLKLANGRVIEKTLYNRRTRQDEPALFVALTFERREVLDSSNIKPMNLIGVDRGENIPAVIALTDPEGCPLSRFKDSLGNPTHILRIGESYKEKQRTIQAKKEVEQRRAGGYSRKYASKAKNLADDMVRNTARDLLYYAVTQDAMLIFENLSRGFGRQGKRTFMAERQYTRMEDWLTAKLAYEGLPSKTYLSKTLAQYTSKTCSNCGFTITSADYDRVLEKLKKTATGWMTTINGKELKVEGQITYYNRYKRQNVVKDLSVELDRLSEESVNNDISSWTKGRSGEALSLLKKRFSHRPVQEKFVCLNCGFETHADEQAALNIARSWLFLRSQEYKKYQTNKTTGNTDKRAFVETWQSFYRKKLKEVWKPAV

SEQ ID NO: 9535 - protein, 978 aa, synthetic construct
QEIKRINKIRRRLVKDSNTKKAGKTGPMKTLLVRVMTPDLRERLENLRKKPENIPQPISNTSRANLNKLLTDYTEMKKAILHVYWEEFQKDPVGLMSRVAQPASKKIDQNKLKPEMDEKGNLTTAGFACSQCGQPLFVYKLEQVSEKGKAYTNYFGRCNVAEHEKLILLAQLKPEKDSDEAVTYSLGKFGQRALDFYSIHVTKESTHPVKPLAQIAGNRYASGPVGKALSDACMGTIASFLSKYQDIIIEHQKVVKGNQKRLESLRELAGKENLEYPSVTLPPQPHTKEGVDAYNEVIARVRMWVNLNLWQKLKLSRDDAKPLLRLKGFPSFPLVERQANEVDWWDMVCNVKKLINEKKEDGKVFWQNLAGYKRQEALRPYLSSEEDRKKGKKFARTQLGDLLLHLEKKHGEDWGKVYDEAWERIDKKVEGLSKHIKLEEERRSEDAQSKAALTDWLRAKASFVIEGLKEADKDEFCRCDLKLQKWYGDLRGKPFAIEAENSILDISGFSKQYNCAFIWQKDGVKKLNLYLIINYFKGGKLRFKKIKPEAFEANRFYTVINKKSGEIVPMEVNFNFDDPNLIILPLAFGKRQGREFIWNDLLSLETGSLKLANGRVIEKTLYNRRTRQDEPALFVALTFERREVLDSSNIKPMNLIGVDRGENIPAVIALTDPEGCPLSRFKDSLGNPTHILRIGESYKEKQRTIQAKKEVEQRRAGGYSRKYASKAKNLADDMVRNTARDLLYYAVTQDAMLIFENLSRGFGRQGKRTFMAERQYTRMEDWLTAKLAYEGLPSKTYLSKTLAQYTSKTCSNCGFTITSADYDRVLEKLKKTATGWMTTINGKELKVEGQITYYNRYKRQNVVKDLSVELDRLSEESVNNDISSWTKGRSGEALSLLKKRFSHRPVQEKFVCLNCGFETHADEQAALNIARSWLFLRSQEYKKYQTNKTTGNTDKRAFVETWQSFYRKKLKEVWKPAV

SEQ ID NO: 9536 - protein, 978 aa, synthetic construct
QEIKRINKIRRRLVKDSNTKKAGKTGPMKTLLVRVMTPDLRERLENLRKKPENIPQPISNTSRANLNKLLTDYTEMKKAILHVYWEEFQKDPVGLMSRVAQPASKKIDQNKLKPEMDEKGNLTTAGFACSQCGQPLFVYKLEQVSEKGKAYTNYFGRCNVAEHEKLILLAQLKPEKDSDEAVTYSLGKFGQRALDFYSIHVTKESTHPVKPLAQIAGNRYASGPVGKALSDACMGTIASFLSKYQDIIIEHQKVVKGNQKRLESLRELAGKENLEYPSVTLPPQPHTKEGVDAYNEVIARVRMWVNLNLWQKLKLSRDDAKPLLRLKGFPSFPLVERQANEVDWWDMVCNVKKLINEKKEDGKVFWQNLAGYKRQEALRPYLSSEEDRKKGKKFARYQLGDLLLHLEKKHGEDWGKVYDEAWERIDKKVEGLSKHIKLEEERRSEDAQSKAALTDWLRAKASFVIEGLKEADKDEFCRCDLKLQKWYGDLRGKPFAIEAENSILDISGFSKQYNCAFIWQKDGVKKLNLYLIINYFKGGKLRFKKIKPEAFEANRFYTVINKKSGEIVPMEVNFNFDDPNLIILPLAFGKRQGREFIWNDLLSLETGSLKLANGRVIEKTLYNRRTRQDEPALFVALTFERREVLDSSNIKPMNLIGVDRGENIPAVIALTDPEGCPLSRFKDSLGNPTHILRIGESYKEKQRTIQAKKEVEQRRAGGYSRKYASKAKNLADDMVRNTARDLLYYAVTQDAMLIFENLSRGFGRQGKRTFMAERQYTRMEDWLTAKLAYEGLPSKTYLSKTLAQYTSKTCSNCGFTITSADYDRVLEKLKKTATGWMTTINGKELKVEGQITYYNRYKRQNVVKDLSVELDRLSEESVNNDISSWTKGRQGEALSLLKKRFSHRPVQEKFVCLNCGFETHADEQAALNIARSWLFLRSQEYKKYQTNKTTGNTDKRAFVETWQSFYRKKLKEVWKPAV

SEQ ID NO: 9537 - protein, 979 aa, synthetic construct
QEIKRINKIRRRLVKDSNTKKAGKTRGPMKTLLVRVMTPDLRERLENLRKKPENIPQPISNTSRANLNKLLTDYTEMKKAILHVYWEEFQKDPVGLMSRVAQPASKKIDQNKLKPEMDEKGNLTTAGFACSQCGQPLFVYKLEQVSEKGKAYTNYFGRCNVAEHEKLILLAQLKPEKDSDEAVTYSLGKFGQRALDFYSIHVTKESTHPVKPLAQIAGNRYASGPVGKALSDACMGTIASFLSKYQDIIIEHQKVVKGNQKRLESLRELAGKENLEYPSVTLPPQPHTKEGVDAYNEVIARVRMWVNLNLWQKLKLSRDDAKPLLRLKGFPSFPLVERQANEVDWWDMVCNVKKLINEKKEDGKVFWQNLAGYKRQEALRPYLSSEEDRKKGKKFARYQLGDLLLHLEKKHGEDWGKVYDEAWERIDKKVEGLSKHIKLEEERRSEDAQSKAALTDWLRAKASFVIEGLKEADKDEFCRCELKLQKWYGDLRGKPFAIEAENSILDISGFSKQYNCAFIWQKDGVKKLNLYLIINYFKGGKLRFKKIKPEAFEANRFYTVINKKSGEIVPMEVNFNFDDPNLIILPLAFGKRQGREFIWNDLLSLETGSLKLANGRVIEKTLYNRRTRQDEPALFVALTFERREVLDSSNIKPMNLIGVDRGENIPAVIALTDPEGCPLSRFKDSLGNPTHILRIGERYKEKQRTIQAKKEVEQRRAGGYSRKYASKAKNLADDMVRNTARDLLYYAVTQDAMLIFENLSRGFGRQGKRTFMAERQYTRMEDWLTAKLAYEGLPSKTYLSKTLAQYTSKTCSNCGFTITSADYDRVLEKLKKTATGWMTTINGKELKVEGQITYYNRYKRQNVVKDLSVELDRLSEESVNNDISSWTKGRSGEALSLLKKRFSHRPVQEKFVCLNCGFETHADEQAALNIARSWLFLRSQEYKKYQTNKTTGNTDKRAFVETWQSFYRKKLKEVWKPAV

SEQ ID NO: 9538 - protein, 978 aa, synthetic construct
QEIKRINKIRRRLVKDSNTKKAGKTGPMKTLLVRVMTPDLRERLENLRKKPENIPQPISNTSRANLNKLLTDYTEMKKAILHVYWEEFQKDPVGLMSRVAQPASKKIDQNKLKPEMDEKGNLTTAGFACSQCGQPLFVYKLEQVSEKGKAYTNYFGRCNVAEHEKLIKLAQLKPEKDSDEAVTYSLGKFGQRALDFYSIHVTKESTHPVKPLAQIAGNRYASGPVGKALSDACMGTIASFLSKYQDIIIEHQKVVKGNQKRLESLRELAGKENLEYPSVTLPPQPHTKEGVDAYNEVIARVRMWVNLNLWQKLKLSRDDAKPLLRLKGFPSFPLVERQANEVDWWDMVCNVKKLINEKKEDGKVFWQNLAGYKRQEALRPYLSSEEDRKKGKKFARYQLGDLLLHLEKKHGEDWGKVYDEAWERIDKKVEGLSKHIKLEEERRSEDAQSKAALTDWLRAKASFVIEGLKEADKDEFCRCELKLQKWYGDLRGKPFAIEAENSILDISGFSKQYNCAFIWQKDGVKKLNLYLIINYFKGGKLRFKKIKPEAFEANRFYTVINKKSGEIVPMEVNFNFDDPNLIILPLAFGKRQGREFIWNDLLSLETGSLKLANGRVIEKTLYNRRTRQDEPALFVALTFERREVLDSSNIKPMNLIGVDRGENIPAVIALTDPEGCPLSRFKDSLGNPTHILRIGERYKEKQRTIQAKKEVEQRRAGGYSRKYASKAKNLADDMVRNTARDLLYYAVTQDAMLIFENLSRGFGRQGKRTFMAERQYTRMEDWLTAKLAYEGLPSKTYLSKTLAQYTSKTCSNCGFTITSADYDRVLEKLKKTATGWMTTINGKELKVEGQITYYNRYKRQNVVKDLSVELDRLSEESVNNDISSWTKGRSGEALSLLKKRFSHRPVQEKFVCLNCGFETHADEQAALNIARSWLFLRSQEYKKYQTNKTTGNTDKRAFVETWQSFYRKKLKEVWKPAV

SEQ ID NO: 9539 - protein, 978 aa, synthetic construct
QEIKRINKIRRRLVKDSNTKKAGKTGPMKTLLVRVMTPDLRERLENLRKKPENIPQPISNTSRANLNKLLTDYTEMKKAILHVYWEEFQKDPVGLMSRVAQPASKKIDQNKLKPEMDEKGNLTTAGFACSQCGQPLFVYKLEQVSEKGKAYTNYFGRCNVAEHEKLILLDQLKPEKDSDEAVTYSLGKFGQRALDFYSIHVTKESTHPVKPLAQIAGNRYASGPVGKALSDACMGTIASFLSKYQDIIIEHQKVVKGNQKRLESLRELAGKENLEYPSVTLPPQPHTKEGVDAYNEVIARVRMWVNLNLWQKLKLSRDDAKPLLRLKGFPSFPLVERQANEVDWWDMVCNVKKLINEKKEDGKVFWQNLAGYKRQEALRPYLSSEEDRKKGKKFARYQLGDLLLHLEKKHGEDWGKVYDEAWERIDKKVEGLSKHIKLEEERRSEDAQSKAALTDWLRAKASFVIEGLKEADKDEFCRCELKLQKWYGDLRGKPFAIEAENSILDISGFSKQYNCAFIWQKDGVKKLNLYLIINYFKGGKLRFKKIKPEAFEANRFYTVINKKSGEIVPMEVNFNFDDPNLIILPLAFGKRQGREFIWNDLLSLETGSLKLANGRVIEKTLYNRRTRQDEPALFVALTFERREVLDSSNIKPMNLIGVDRGENIPAVIALTDPEGCPLSRFKDSLGNPTHILRIGERYKEKQRTIQAKKEVEQRRAGGYSRKYASKAKNLADDMVRNTARDLLYYAVTQDAMLIFENLSRGFGRQGKRTFMAERQYTRMEDWLTAKLAYEGLPSKTYLSKTLAQYTSKTCSNCGFTITSADYDRVLEKLKKTATGWMTTINGKELKVEGQITYYNRYKRQNVVKDLSVELDRLSEESVNNDISSWTKGRSGEALSLLKKRFSHRPVQEKFVCLNCGFETHADEQAALNIARSWLFLRSQEYKKYQTNKTTGNTDKRAFVETWQSFYRKKLKEVWKPAV

SEQ ID NO: 9540 - protein, 978 aa, synthetic construct
QEIKRINKIRRRLVKDSNTKKAGKTGPMKTLLVRVMTPDLRERLENLRKKPENIPQPISNTSRANLNKLLTDYTEMKKAILHVYWEEFQKDPVGLMSRVAQPASKKIDQNKLKPEMDEKGNLTTAGFACSQCGQPLFVYKLEQVSEKGKAYTNYFGRCNVAEHEKLILLAQLKPEKDSDEAVTYSLGKFGQRALDFYSIHVTKESTHPVKPLAQIAGNRYASGPVGKALSDACMGTIASFLSKYQDIIIEHQKVVKGNQKRLESLRELAGKENLEYPSVTLPPQPHTKEGVDAYNEVIARVRTWVNLNLWQKLKLSRDDAKPLLRLKGFPSFPLVERQANEVDWWDMVCNVKKLINEKKEDGKVFWQNLAGYKRQEALRPYLSSEEDRKKGKKFARYQLGDLLLHLEKKHGEDWGKVYDEAWERIDKKVEGLSKHIKLEEERRSEDAQSKAALTDWLRAKASFVIEGLKEADKDEFCRCELKLQKWYGDLRGKPFAIEAENSILDISGFSKQYNCAFIWQKDGVKKLNLYLIINYFKGGKLRFKKIKPEAFEANRFYTVINKKSGEIVPMEVNFNFDDPNLIILPLAFGKRQGREFIWNDLLSLETGSLKLANGRVIEKTLYNRRTRQDEPALFVALTFERREVLDSSNIKPMNLIGVDRGENIPAVIALTDPEGCPLSRFKDSLGNPTHILRIGERYKEKQRTIQAKKEVEQRRAGGYSRKYASKAKNLADDMVRNTARDLLYYAVTQDAMLIFENLSRGFGRQGKRTFMAERQYTRMEDWLTAKLAYEGLPSKTYLSKTLAQYTSKTCSNCGFTITSADYDRVLEKLKKTATGWMTTINGKELKVEGQITYYNRYKRQNVVKDLSVELDRLSEESVNNDISSWTKGRSGEALSLLKKRFSHRPVQEKFVCLNCGFETHADEQAALNIARSWLFLRSQEYKKYQTNKTTGNTDKRAFVETWQSFYRKKLKEVWKPAV

SEQ ID NO: 9541 - protein, 978 aa, synthetic construct
QEIKRINKIRRRLVKDSNTKKAGKTGPMKTLLVRVMTPDLRERLENLRKKPENIPQPISNTSRANLNKLLTDYTEMKKAILHVYWEEFQKDPVGLMSRVAQPASKKIDQNKLKPEMDEKGNLTTAGFACSQCGQPLFVYKLEQVSEKGKAYTNYFGRCNVAEHEKLILLAQLKPEKDSDEAVTYSLGKFGQRALDFYSIHVTKESTHPVKPLAQIAGNRYASGPVGKALSDACMGTIASFLSKYQDIIIEHQKVVKGNQKRLESLRELAGKENLEYPSVTLPPQPHTKEGVDAYNEVIARVRMWVNLNLWQKLKLSRDDAKPLLRLKGFPSFPLVERQANEVDWWDMVCNVKKLINEKKEDGKVFWQNLAGYKRQEALRPYLSSEEDRKKGKKFARTQLGDLLLHLEKKHGEDWGKVYDEAWERIDKKVEGLSKHIKLEEERRSEDAQSKAALTDWLRAKASFVIEGLKEADKDEFCRCELKLQKWYGDLRGKPFAIEAENSILDISGFSKQYNCAFIWQKDGVKKLNLYLIINYFKGGKLRFKKIKPEAFEANRFYTVINKKSGEIVPMEVNFNFDDPNLIILPLAFGKRQGREFIWNDLLSLETGSLKLANGRVIEKTLYNRRTRQDEPALFVALTFERREVLDSSNIKPMNLIGVDRGENIPAVIALTDPEGCPLSRFKDSLGNPTHILRIGERYKEKQRTIQAKKEVEQRRAGGYSRKYASKAKNLADDMVRNTARDLLYYAVTQDAMLIFENLSRGFGRQGKRTFMAERQYTRMEDWLTAKLAYEGLPSKTYLSKTLAQYTSKTCSNCGFTITSADYDRVLEKLKKTATGWMTTINGKELKVEGQITYYNRYKRQNVVKDLSVELDRLSEESVNNDISSWTKGRSGEALSLLKKRFSHRPVQEKFVCLNCGFETHADEQAALNIARSWLFLRSQEYKKYQTNKTTGNTDKRAFVETWQSFYRKKLKEVWKPAV

SEQ ID NO: 9542 - protein, 978 aa, synthetic construct
QEIKRINKIRRRLVKDSNTKKAGKTGPMKTLLVRVMTPDLRERLENLRKKPENIPQPISNTSRANLNKLLTDYTEMKKAILHVYWEEFQKDPVGLMSRVAQPASKKIDQNKLKPEMDEKGNLTTAGFACSQCGQPLFVYKLEQVSEKGKAYTNYFGRCNVAEHEKLILLAQLKPEKDSDEAVTYSLGKFGQRALDFYSIHVTKESTHPVKPLAQIAGNRYASGPVGKALSDACMGTIASFLSKYQDIIIEHQKVVKGNQKRLESLRELAGKENLEYPSVTLPPQPHTKEGVDAYNEVIARVRMWVNLNLWQKLKLSRDDAKPLLRLKGFPSFPLVERQANEVDWWDMVCNVKKLINEKKEDGKVFWQNLAGYKRQEALRPYLSSEEDRKKGKKFARYQLGDLLLHLEKKHGEDWGKVYDEAWERIDKKVEGLSKHIKLEEERRSEDAQSKAALTDWLRAKASFVIEGLKEADKDEFCRCELKLQKWYGDLRGKPFAIEAENSILDISGFSKQYNCAFIWQKDGVKKLNLYLIINYFKGGKLRFKKIKPEAFEANRFYTVINKKSGEIVPMEVNFNFDDPNLIILPLAFGKRQGREFIWNDLLSLETGSLKLANGRVIEKTLYNRRTRQDEPALFVALTFERREVLDSSNIKPMNLIGVDRGENIPAVIALTDPEGCPLSRFKDSLGNPTHILRIGERYKEKQRTIQAKKEVEQRRAGGYSRKYASKAKNLADDMVRNTARDLLYYAVTQDAMLIFENLSRGFGRQGKRTFMAERQYTRMEDWLTAKLAYEGLPSKTYLSKTLAQYTSKTCSNCGFTITSADYDRVLEKLKKTATGWMTTINGKELKVEGQITYYNRYKRQNVVKDLSVELDRLSEESVNNDISSWTKGRQGEALSLLKKRFSHRPVQEKFVCLNCGFETHADEQAALNIARSWLFLRSQEYKKYQTNKTTGNTDKRAFVETWQSFYRKKLKEVWKPAV

SEQ ID NO: 9543 - protein, 57 aa, synthetic construct
QEIKRINKIRRRLVKDSNTKKAGKTRGPMKTLLVRVMTPDLRERLENLRKKPENIPQ

SEQ ID NO: 9544 - protein, 141 aa, synthetic construct
RALDFYSIHVTKESTHPVKPLAQIAGNRYASTPVGKALSDACMGTIASFLSKYQDIIIEHQKVVKGNQKRLESLRELAGKENLEYPSVTLPPQPHTKEGVDAYNEVIARVRMWVNLNLWQKLKLSRDDAKPLLRLKGFPSF

SEQ ID NO: 9545 - protein, 91 aa, synthetic construct
QPASKKIDQNKLKPEMDEKGNLTTAGFACSQCGQPLFVYKLEQVSEKGKAYTNYFGRCNVAEHEKLILLDQLKPEKDSDEAVTYSLGKFGQ

SEQ ID NO: 9546 - protein, 56 aa, synthetic construct
QEGKRINKIRRRLVKDSNTKKAGKTGPMKTLLVRVMTPDLRERLENLRKKPENIPQ

SEQ ID NO: 9547 - protein, 57 aa, synthetic construct
QEIGKRINKIRRRLVKDSNTKKAGKTGPMKTLLVRVMTPDLRERLENLRKKPENIPQ

SEQ ID NO: 9548 - protein, 56 aa, synthetic construct
QEIGRINKIRRRLVKDSNTKKAGKTGPMKTLLVRVMTPDLRERLENLRKKPENIPQ

SEQ ID NO: 9549 - protein, 57 aa, synthetic construct
QEIKGRINKIRRRLVKDSNTKKAGKTGPMKTLLVRVMTPDLRERLENLRKKPENIPQ

SEQ ID NO: 9550 - protein, 56 aa, synthetic construct
QEIKRINGIRRRLVKDSNTKKAGKTGPMKTLLVRVMTPDLRERLENLRKKPENIPQ

SEQ ID NO: 9551 - protein, 56 aa, synthetic construct
QEIKRINKIRRRLVKDSNTKKAGKTGPMKTLLVPVMTPDLRERLENLRKKPENIPQ

SEQ ID NO: 9552 - protein, 44 aa, synthetic construct
PISNTSQANLNKLLTDYTEMKKAILHVYWEEFQKDPVGLMSRVA

SEQ ID NO: 9553 - protein, 91 aa, synthetic construct
QPASKKIDQNKLKPEMDEKGNLTTAGFACSQCGQPLFVYKLEQVSEKGKAYTNYFGRCNVAEHEKLIKLAQLKPEKDSDEAVTYSLGKFGQ

SEQ ID NO: 9554 - protein, 91 aa, synthetic construct
QPASKKIDQNKLKPEMDEKGNLTTAGFACSQCGQPLFVYKLEQVSEKGKAYTNYFGRCNVAEHEKLILLYQLKPEKDSDEAVTYSLGKFGQ

SEQ ID NO: 9555 - protein, 91 aa, synthetic construct
QPASKKIDQNKLKPEMDEKGNLTTAGFACSQCGQPLFVYKLEQVSEKGKAYTNYFGRCNVAEHEKLILLSQLKPEKDSDEAVTYSLGKFGQ

SEQ ID NO: 9556 - protein, 141 aa, synthetic construct
RALDFYSIHVTKESTHPVKPLAQIAGNRYASGPVGKALSDACMGTIASFLSKYQDIIIEHQKVVKGNQKRLESLRELAGKENLEYPSVTLPPQPHTKEGVDAYNEVIARVRTWVNLNLWQKLKLSRDDAKPLLRLKGFPSF

SEQ ID NO: 9557 - protein, 141 aa, synthetic construct
RALDFYSIHVTKESTHPVKPLAQIAGNRYASGPVGKALSDACMGTIASFLSKYQDIIIEHQKVVKGNQKRLESLRELAGKENLEYPSVTLPPQPHTKEGVDAYNEVIARVRWWVNLNLWQKLKLSRDDAKPLLRLKGFPSF

SEQ ID NO: 9558 - protein, 168 aa, synthetic construct
PLVERQANEVDWWDMVCNVKKLINEKKEDGKVFWQNLAGYKRQEALRPYLSSEEDRKKGKKFARTQLGDLLLHLEKKHGEDWGKVYDEAWERIDKKVEGLSKHIKLEEERRSEDAQSKAALTDWLRAKASFVIEGLKEADKDEFCRCELKLQKWYGDLRGKPFAIEAE

SEQ ID NO: 9559 - protein, 168 aa, synthetic construct
PLVERQANEVDWWDMVCNVKKLINEKKEDGKVFWQNLAGYKRQEALRPYLSSEEDRKKGKKFARYQLGDLLLHLEKKHGEDWGKVYDEAWERIDKKVEGLSKHIKLEEERRSEDAQSKAALTDWLRAKASFVIEGLKEADKDEFCRCDLKLQKWYGDLRGKPFAIEAE

SEQ ID NO: 9560 - protein, 110 aa, synthetic construct
SNCGFTITSADYDRVLEKLKKTATGWMTTINGKELKVEGQITYYNRYKRQNVVKDLSVELDRLSEESVNNDISSWDKGRSGEALSLLKKRFSHRPVQEKFVCLNCGFETH

SEQ ID NO: 9561 - protein, 91 aa, synthetic construct
QPASKKIDQNKLKPEMDEKGNLTTAGFACSQCGQPLFVYKLEQVSEKGKAYTNYFGRCNVAEHEKLIQLAQLKPEKDSDEAVTYSLGKFGQ

SEQ ID NO: 9562 - protein, 110 aa, synthetic construct
SNCGFTITSADYDRMLEKLKKTATGWMTTINGKELKVEGQITYYNRYKRQNVVKDLSVELDRLSEESVNNDISSWTKGRSGEALSLLKKRFSHRPVQEKFVCLNCGFETH

SEQ ID NO: 9563 - protein, 110 aa, synthetic construct
SNCGFTITSADYDRVLEKLKKTATGWMTTINGKELKVEGQITYYNRYKRQNVVKDLSVELDRLSEESVNNDISSWTKGRQGEALSLLKKRFSHRPVQEKFVCLNCGFETH

SEQ ID NO: 9564 - protein, 164 aa, synthetic construct
SSNIKPMNLIGVDRGENIPAVIALTDPEGCPLSRFKDSLGNPTHILRIGERYKEKQRTIQAKKEVEQRRAGGYSRKYASKAKNLADDMVRNTARDLLYYAVTQDAMLIFENLSRGFGRQGKRTFMAERQYTRMEDWLTAKLAYEGLPSKTYLSKTLAQYTSKTC

SEQ ID NO: 9565 - protein, 56 aa, synthetic construct
QEGKRINKIRRRLVKDSNTKKAGKTGPMKTLLVPVMTPDLRERLENLRKKPENIPQ

SEQ ID NO: 9566 - protein, 57 aa, synthetic construct
QEIGKRINKIRRRLVKDSNTKKAGKTGPMKTLLVPVMTPDLRERLENLRKKPENIPQ

SEQ ID NO: 9567 - protein, 57 aa, synthetic construct
QEGKRINKIRRRLVKDSNTKKAGKTRGPMKTLLVRVMTPDLRERLENLRKKPENIPQ

SEQ ID NO: 9568 - protein, 56 aa, synthetic construct
QEIKRINGIRRRLVKDSNTKKAGKTGPMKTLLVPVMTPDLRERLENLRKKPENIPQ

SEQ ID NO: 9569 - protein, 58 aa, synthetic construct
QEIGKRINKIRRRLVKDSNTKKAGKTRGPMKTLLVRVMTPDLRERLENLRKKPENIPQ

SEQ ID NO: 9570 - protein, 56 aa, synthetic construct
QEGKRINGIRRRLVKDSNTKKAGKTGPMKTLLVRVMTPDLRERLENLRKKPENIPQ

SEQ ID NO: 9571 - protein, 57 aa, synthetic construct
QEIKRINKIRRRLVKDSNTKKAGKTRGPMKTLLVPVMTPDLRERLENLRKKPENIPQ

SEQ ID NO: 9572 - protein, 57 aa, synthetic construct
QEIKRINGIRRRLVKDSNTKKAGKTRGPMKTLLVRVMTPDLRERLENLRKKPENIPQ

SEQ ID NO: 9573 - protein, 57 aa, synthetic construct
QEIGKRINGIRRRLVKDSNTKKAGKTGPMKTLLVRVMTPDLRERLENLRKKPENIPQ

SEQ ID NO: 9574 - protein, 57 aa, synthetic construct
QEGGKRINKIRRRLVKDSNTKKAGKTGPMKTLLVRVMTPDLRERLENLRKKPENIPQ

SEQ ID NO: 9575 - protein, 57 aa, synthetic construct
QEIGRINKIRRRLVKDSNTKKAGKTRGPMKTLLVRVMTPDLRERLENLRKKPENIPQ

SEQ ID NO: 9576 - protein, 58 aa, synthetic construct
QEIKGRINKIRRRLVKDSNTKKAGKTRGPMKTLLVRVMTPDLRERLENLRKKPENIPQ

SEQ ID NO: 9577 - protein, 91 aa, synthetic construct
QPASKKIDQNKLKPEMDEKGNLTTAGFACSQCGQPLFVYKLEQVSEKGKAYTNYFGRCNVAEHEKLIKLDQLKPEKDSDEAVTYSLGKFGQ

SEQ ID NO: 9578 - protein, 91 aa, synthetic construct
QPASKKIDQNKLKPEMDEKGNLTTAGFACSQCGQPLFVYKLEQVSEKGKAYTNYFGRCNVAEHEKLIKLYQLKPEKDSDEAVTYSLGKFGQ

SEQ ID NO: 9579 - protein, 91 aa, synthetic construct
QPASKKIDQNKLKPEMDEKGNLTTAGFACSQCGQPLFVYKLEQVSEKGKAYTNYFGRCNVAEHEKLIKLSQLKPEKDSDEAVTYSLGKFGQ

SEQ ID NO: 9580 - protein, 91 aa, synthetic construct
QPASKKIDQNKLKPEMDEKGNLTTAGFACSQCGQPLFVYKLEQVSEKGKAYTNYFGRCNVAEHEKLIQLDQLKPEKDSDEAVTYSLGKFGQ

SEQ ID NO: 9581 - protein, 91 aa, synthetic construct
QPASKKIDQNKLKPEMDEKGNLTTAGFACSQCGQPLFVYKLEQVSEKGKAYTNYFGRCNVAEHEKLIQLYQLKPEKDSDEAVTYSLGKFGQ

SEQ ID NO: 9582 - protein, 91 aa, synthetic construct
QPASKKIDQNKLKPEMDEKGNLTTAGFACSQCGQPLFVYKLEQVSEKGKAYTNYFGRCNVAEHEKLIQLSQLKPEKDSDEAVTYSLGKFGQ

SEQ ID NO: 9583 - protein, 141 aa, synthetic construct
RALDFYSIHVTKESTHPVKPLAQIAGNRYASTPVGKALSDACMGTIASFLSKYQDIIIEHQKVVKGNQKRLESLRELAGKENLEYPSVTLPPQPHTKEGVDAYNEVIARVRTWVNLNLWQKLKLSRDDAKPLLRLKGFPSF

SEQ ID NO: 9584 - protein, 168 aa, synthetic construct
PLVERQANEVDWWDMVCNVKKLINEKKEDGKVFWQNLAGYKRQEALRPYLSSEEDRKKGKKFARTQLGDLLLHLEKKHGEDWGKVYDEAWERIDKKVEGLSKHIKLEEERRSEDAQSKAALTDWLRAKASFVIEGLKEADKDEFCRCDLKLQKWYGDLRGKPFAIEAE

SEQ ID NO: 9585 - protein, 110 aa, synthetic construct
SNCGFTITSADYDRVLEKLKKTATGWMTTINGKELKVEGQITYYNRYKRQNVVKDLSVELDRLSEESVNNDISSWDKGRQGEALSLLKKRFSHRPVQEKFVCLNCGFETH

SEQ ID NO: 9586 - protein, 110 aa, synthetic construct
SNCGFTITSADYDRMLEKLKKTATGWMTTINGKELKVEGQITYYNRYKRQNVVKDLSVELDRLSEESVNNDISSWDKGRSGEALSLLKKRFSHRPVQEKFVCLNCGFETH

SEQ ID NO: 9587 - protein, 110 aa, synthetic construct
SNCGFTITSADYDRMLEKLKKTATGWMTTINGKELKVEGQITYYNRYKRQNVVKDLSVELDRLSEESVNNDISSWTKGRQGEALSLLKKRFSHRPVQEKFVCLNCGFETH

SEQ ID NO: 9588 - RNA, 89 nt, synthetic construct
  source 1..89: mol_type = other RNA
actggcgcttctatctgattactctgagcgccatcaccagcgactatgtcgtagtgggtaaagctccctcttcggagggagcatcagag

SEQ ID NO: 9589 - protein, 8 aa, synthetic construct
SIINFEKL

SEQ ID NO: 9590 - protein, 979 aa, synthetic construct
MQEIKRINKIRRRLVKDSNTKKAGKTGPMKTLLVRVMTPDLRERLENLRKKPENIPQPISNTSRANLNKLLTDYTEMKKAILHVYWEEFQKDPVGLMSRVAQPASKKIDQNKLKPEMDEKGNLTTAGFACSQCGQPLFVYKLEQVSEKGKAYTNYFGRCNVAEHEKLILLAQLKPEKDSDEAVTYSLGKFGQRALDFYSIHVTKESTHPVKPLAQIAGNRYASGPVGKALSDACMGTIASFLSKYQDIIIEHQKVVKGNQKRLESLRELAGKENLEYPSVTLPPQPHTKEGVDAYNEVIARVRMWVNLNLWQKLKLSRDDAKPLLRLKGFPSFPLVERQANEVDWWDMVCNVKKLINEKKEDGKVFWQNLAGYKRQEALRPYLSSEEDRKKGKKFARYQLGDLLLHLEKKHGEDWGKVYDEAWERIDKKVEGLSKHIKLEEERRSEDAQSKAALTDWLRAKASFVIEGLKEADKDEFCRCELKLQKWYGDLRGKPFAIEAENSILDISGFSKQYNCAFIWQKDGVKKLNLYLIINYFKGGKLRFKKIKPEAFEANRFYTVINKKSGEIVPMEVNFNFDDPNLIILPLAFGKRQGREFIWNDLLSLETGSLKLANGRVIEKTLYNRRTRQDEPALFVALTFERREVLDSSNIKPMNLIGVDRGENIPAVIALTDPEGCPLSRFKDSLGNPTHILRIGESYKEKQRTIQAKKEVEQRRAGGYSRKYASKAKNLADDMVRNTARDLLYYAVTQDAMLIFENLSRGFGRQGKRTFMAERQYTRMEDWLTAKLAYEGLPSKTYLSKTLAQYTSKTCSNCGFTITSADYDRVLEKLKKTATGWMTTINGKELKVEGQITYYNRYKRQNVVKDLSVELDRLSEESVNNDISSWTKGRSGEALSLLKKRFSHRPVQEKFVCLNCGFETHADEQAALNIARSWLFLRSQEYKKYQTNKTTGNTDKRAFVETWQSFYRKKLKEVWKPAV

SEQ ID NO: 9591 - DNA, 60 bp, synthetic construct
  misc_feature 1: note = 5' Amino Modifier C6
  source 1..60: mol_type = other DNA
tgaagctgacagcattcgggccgagatgtctcgctccgtggccttagctgtgctcgcgct

SEQ ID NO: 9592 - DNA, 60 bp, synthetic construct
  misc_feature 1: note = 5' Amino Modifier C6
  source 1..60: mol_type = other DNA
agcgcgagcacagctaaggccacggagcgagacatctcggcccgaatgctgtcagcttca

SEQ ID NO: 9593 - DNA, 60 bp, synthetic construct
  misc_feature 1: note = 5' Amino Modifier C6
  source 1..60: mol_type = other DNA
tgaagctgacagcattcgggcctagatgtctcgctccgtggccttagctgtgctcgcgct

SEQ ID NO: 9594 - DNA, 60 bp, synthetic construct
  misc_feature 1: note = 5' Amino Modifier C6
  source 1..60: mol_type = other DNA
agcgcgagcacagctaaggccacggagcgagacatctaggcccgaatgctgtcagcttca

SEQ ID NO: 9595 - DNA, 60 bp, synthetic construct
  misc_feature 1: note = 5' Amino Modifier C6
  source 1..60: mol_type = other DNA
tgaagctgacagcattcgggccgagatatctcgctccgtggccttagctgtgctcgcgct

SEQ ID NO: 9596 - DNA, 60 bp, synthetic construct
  misc_feature 1: note = 5' Amino Modifier C6
  source 1..60: mol_type = other DNA
agcgcgagcacagctaaggccacggagcgagatatctcggcccgaatgctgtcagcttca

SEQ ID NO: 9597 - DNA, 60 bp, synthetic construct
  misc_feature 1: note = 5' Amino Modifier C6
  source 1..60: mol_type = other DNA
tgaagctgacagcattcgggccgagatgtctcgatccgtggccttagctgtgctcgcgct

SEQ ID NO: 9598 - DNA, 60 bp, synthetic construct
  misc_feature 1: note = 5' Amino Modifier C6
  source 1..60: mol_type = other DNA
agcgcgagcacagctaaggccacggatcgagacatctcggcccgaatgctgtcagcttca

SEQ ID NO: 9599 - DNA, 60 bp, synthetic construct
  misc_feature 1: note = 5' Amino Modifier C6
  source 1..60: mol_type = other DNA
ctttcagcaaggactggtctttctatctcttgtactacactgaattcacccccactgaaa

SEQ ID NO: 9600 - DNA, 60 bp, synthetic construct
  misc_feature 1: note = 5' Amino Modifier C6
  source 1..60: mol_type = other DNA
tttcagtgggggtgaattcagtgtagtacaagagatagaaagaccagtccttgctgaaag

SEQ ID NO: 9601 - DNA, 60 bp, synthetic construct
  misc_feature 1: note = 5' Amino Modifier C6
  source 1..60: mol_type = other DNA
ctttcagcaaggactggtctttctatctcttgtacgacactgaattcacccccactgaaa

SEQ ID NO: 9602 - DNA, 60 bp, synthetic construct
  misc_feature 1: note = 5' Amino Modifier C6
  source 1..60: mol_type = other DNA
tttcagtgggggtgaattcagtgtcgtacaagagatagaaagaccagtccttgctgaaag

SEQ ID NO: 9603 - DNA, 60 bp, synthetic construct
  misc_feature 1: note = 5' Amino Modifier C6
  source 1..60: mol_type = other DNA
ctttcagcaaggactggtctttctatctctcgtactacactgaattcacccccactgaaa

SEQ ID NO: 9604 - DNA, 60 bp, synthetic construct
  misc_feature 1: note = 5' Amino Modifier C6
  source 1..60: mol_type = other DNA
tttcagtgggggtgaattcagtgtagtacgagagatagaaagaccagtccttgctgaaag

SEQ ID NO: 9605 - DNA, 60 bp, synthetic construct
  misc_feature 1: note = 5' Amino Modifier C6
  source 1..60: mol_type = other DNA
ctttcagcaaggactggtctttctgtctcttgtactacactgaattcacccccactgaaa

SEQ ID NO: 9606 - DNA, 60 bp, synthetic construct
  misc_feature 1: note = 5' Amino Modifier C6
  source 1..60: mol_type = other DNA
tttcagtgggggtgaattcagtgtagtacaagagacagaaagaccagtccttgctgaaag

SEQ ID NO: 9607 - protein, 979 aa, synthetic construct
QEIKRINKIRRRLVKDSNTKKAGKTRGPMKTLLVRVMTPDLRERLENLRKKPENIPQPISNTSRANLNKLLTDYTEMKKAILHVYWEEFQKDPVGLMSRVAQPASKKIDQNKLKPEMDEKGNLTTAGFACSQCGQPLFVYKLEQVSEKGKAYTNYFGRCNVAEHEKLILLDQLKPEKDSDEAVTYSLGKFGQRALDFYSIHVTKESTHPVKPLAQIAGNRYASTPVGKALSDACMGTIASFLSKYQDIIIEHQKVVKGNQKRLESLRELAGKENLEYPSVTLPPQPHTKEGVDAYNEVIARVRMWVNLNLWQKLKLSRDDAKPLLRLKGFPSFPLVERQANEVDWWDMVCNVKKLINEKKEDGKVFWQNLAGYKRQEALRPYLSSEEDRKKGKKFARYQLGDLLLHLEKKHGEDWGKVYDEAWERIDKKVEGLSKHIKLEEERRSEDAQSKAALTDWLRAKASFVIEGLKEADKDEFCRCELKLQKWYGDLRGKPFAIEAENSILDISGFSKQYNCAFIWQKDGVKKLNLYLIINYFKGGKLRFKKIKPEAFEANRFYTVINKKSGEIVPMEVNFNFDDPNLIILPLAFGKRQGREFIWNDLLSLETGSLKLANGRVIEKTLYNRRTRQDEPALFVALTFERREVLDSSNIKPMNLIGVDRGENIPAVIALTDPEGCPLSRFKDSLGNPTHILRIGESYKEKQRTIQAKKEVEQRRAGGYSRKYASKAKNLADDMVRNTARDLLYYAVTQDAMLIFENLSRGFGRQGKRTFMAERQYTRMEDWLTAKLAYEGLPSKTYLSKTLAQYTSKTCSNCGFTITSADYDRVLEKLKKTATGWMTTINGKELKVEGQITYYNRYKRQNVVKDLSVELDRLSEESVNNDISSWTKGRSGEALSLLKKRFSHRPVQEKFVCLNCGFETHADEQAALNIARSWLFLRSQEYKKYQTNKTTGNTDKRAFVETWQSFYRKKLKEVWKPAV

SEQ ID NO: 9608 - protein, 978 aa, synthetic construct
QEIKRINKIRRRLVKDSNTKKAGKTGPMKTLLVPVMTPDLRERLENLRKKPENIPQPISNTSRANLNKLLTDYTEMKKAILHVYWEEFQKDPVGLMSRVAQPASKKIDQNKLKPEMDEKGNLTTAGFACSQCGQPLFVYKLEQVSEKGKAYTNYFGRCNVAEHEKLILLYQLKPEKDSDEAVTYSLGKFGQRALDFYSIHVTKESTHPVKPLAQIAGNRYASGPVGKALSDACMGTIASFLSKYQDIIIEHQKVVKGNQKRLESLRELAGKENLEYPSVTLPPQPHTKEGVDAYNEVIARVRTWVNLNLWQKLKLSRDDAKPLLRLKGFPSFPLVERQANEVDWWDMVCNVKKLINEKKEDGKVFWQNLAGYKRQEALRPYLSSEEDRKKGKKFARYQLGDLLLHLEKKHGEDWGKVYDEAWERIDKKVEGLSKHIKLEEERRSEDAQSKAALTDWLRAKASFVIEGLKEADKDEFCRCELKLQKWYGDLRGKPFAIEAENSILDISGFSKQYNCAFIWQKDGVKKLNLYLIINYFKGGKLRFKKIKPEAFEANRFYTVINKKSGEIVPMEVNFNFDDPNLIILPLAFGKRQGREFIWNDLLSLETGSLKLANGRVIEKTLYNRRTRQDEPALFVALTFERREVLDSSNIKPMNLIGVDRGENIPAVIALTDPEGCPLSRFKDSLGNPTHILRIGESYKEKQRTIQAKKEVEQRRAGGYSRKYASKAKNLADDMVRNTARDLLYYAVTQDAMLIFENLSRGFGRQGKRTFMAERQYTRMEDWLTAKLAYEGLPSKTYLSKTLAQYTSKTCSNCGFTITSADYDRVLEKLKKTATGWMTTINGKELKVEGQITYYNRYKRQNVVKDLSVELDRLSEESVNNDISSWTKGRSGEALSLLKKRFSHRPVQEKFVCLNCGFETHADEQAALNIARSWLFLRSQEYKKYQTNKTTGNTDKRAFVETWQSFYRKKLKEVWKPAV

SEQ ID NO: 9609 - protein, 979 aa, synthetic construct
QEIKRINKIRRRLVKDSNTKKAGKTRGPMKTLLVRVMTPDLRERLENLRKKPENIPQPISNTSRANLNKLLTDYTEMKKAILHVYWEEFQKDPVGLMSRVAQPASKKIDQNKLKPEMDEKGNLTTAGFACSQCGQPLFVYKLEQVSEKGKAYTNYFGRCNVAEHEKLIKLAQLKPEKDSDEAVTYSLGKFGQRALDFYSIHVTKESTHPVKPLAQIAGNRYASGPVGKALSDACMGTIASFLSKYQDIIIEHQKVVKGNQKRLESLRELAGKENLEYPSVTLPPQPHTKEGVDAYNEVIARVRMWVNLNLWQKLKLSRDDAKPLLRLKKFPSFPLVERQANEVDWWDMVCNVKKLINEKKEDGKVFWQNLAGYKRQEALRPYLSSEEDRKKGKKFARYQLGDLLLHLEKKHGEDWGKVYDEAWERIDKKVEGLSKHIKLEEERRSEDAQSKAALTDWLRAKASFVIEGLKEADKDEFCRCELKLQKWYGDLRGKPFAIEAENSILDISGFSKQYNCAFIWQKDGVKKLNLYLIINYFKGGKLRFKKIKPEAFEANRFYTVINKKSGEIVPMEVNFNFDDPNLIILPLAFGKRQGREFIWNDLLSLETGSLKLANGRVIEKTLYNRRTRQDEPALFVALTFERREVLDSSNIKPMNLIGVDRGENIPAVIALTDPEGCPLSRFKDSLGNPTHILRIGESYKEKQRTIQAKKEVEQRRAGGYSRKYASKAKNLADDMVRNTARDLLYYAVTQDAMLIFENLSRGFGRQGKRTFMAERQYTRMEDWLTAKLAYEGLPSKTYLSKTLAQYTSKTCSNCGFTITSADYDRVLEKLKKTATGWMTTINGKELKVEGQITYYNRYKRQNVVKDLSVELDRLSEESVNNDISSWTKGRSGEALSLLKKRFSHRPVQEKFVCLNCGFETHADEQAALNIARSWLFLRSQEYKKYQTNKTTGNTDKRAFVETWQSFYRKKLKEVWKPAV

SEQ ID NO: 9610 - DNA, 90 bp, synthetic construct
  source 1..90: mol_type = other DNA
actggctgcttctatctgattactctgagcgccatcaccagcgactatgtcgtagtgggtaaagctccctcttcggagggagcatcagag

SEQ ID NO: 9611 - DNA, 90 bp, synthetic construct
  source 1..90: mol_type = other DNA
actggcggcttctatctgattactctgagcgccatcaccagcgactatgtcgtagtgggtaaagctccctcttcggagggagcatcagag

SEQ ID NO: 9612 - DNA, 90 bp, synthetic construct
  source 1..90: mol_type = other DNA
actggcggcttctatctgattactctgtgcgccatcaccagcgactatgtcgtagtgggtaaagctccctcttcggagggagcatcagag

SEQ ID NO: 9613 - DNA, 91 bp, synthetic construct
  source 1..91: mol_type = other DNA
actggcggcttctatctgattactctgaggcgccatcaccagcgactatgtcgtagtgggtaaagctccctcttcggagggagcatcagag

SEQ ID NO: 9614 - DNA, 91 bp, synthetic construct
  source 1..91: mol_type = other DNA
actggctgcttctatctgattactctgagccgccatcaccagcgactatgtcgtagtgggtaaagctccctcttcggagggagcatcagag

SEQ ID NO: 9615 - DNA, 91 bp, synthetic construct
  source 1..91: mol_type = other DNA
actggccgcttctatctgattactctgaggcgccatcaccagcgactatgtcgtagtgggtaaagctccctcttcggagggagcatcagag

SEQ ID NO: 9616 - DNA, 90 bp, synthetic construct; identical to SEQ ID NO: 9355
  source 1..90: mol_type = other DNA

SEQ ID NO: 9617 - DNA, 90 bp, synthetic construct
  source 1..90: mol_type = other DNA
actggcgcttctatctgattactctgagtcgccatcaccagcgactatgtcgtagtgggtaaagctccctcttcggagggagcatcagag

SEQ ID NO: 9618 - DNA, 91 bp, synthetic construct
  source 1..91: mol_type = other DNA
actggcgggttctatctgattactctgagccgccatcaccagcgactatgtcgtagtgggtaaagctccctcttcggagggagcatcagag

SEQ ID NO: 9619 - DNA, 90 bp, synthetic construct
  source 1..90: mol_type = other DNA
actggccgcttctatctgattactctgagcgccatcaccagcgactatgtcgtagtgggtaaagctccctcttcggagggagcatcagag

SEQ ID NO: 9620 - DNA, 90 bp, synthetic construct
  source 1..90: mol_type = other DNA
actggtggcttctatctgattactctgagcgccatcaccagcgactatgtcgtagtgggtaaagctccctcttcggagggagcatcagag

SEQ ID NO: 9621 - DNA, 90 bp, synthetic construct
  source 1..90: mol_type = other DNA
actggcgggttctatctgattactctgagcgccatcaccagcgactatgtcgtagtgggtaaagctccctcttcggagggagcatcagag

SEQ ID NO: 9622 - DNA, 91 bp, synthetic construct
  source 1..91: mol_type = other DNA
actggcggcttctatctgattactctgggccgccatcaccagcgactatgtcgtagtgggtaaagctccctcttcggagggagcatcagag

SEQ ID NO: 9623 - DNA, 95 bp, synthetic construct
  source 1..95: mol_type = other DNA
acctgtaggcttctatctgattactctgctacagcgccatcaccagcgactatgtcgtagtgggtaaagctccctcttcggagggagcatcagag

SEQ ID NO: 9624 - DNA, 95 bp, synthetic construct
  source 1..95: mol_type = other DNA
accagcaagcttctatctgattactctgttgctgcgccatcaccagcgactatgtcgtagtgggtaaagctccctcttcggagggagcatcagag

SEQ ID NO: 9625 - DNA, 95 bp, synthetic construct
  source 1..95: mol_type = other DNA
accgagacgcttctatctgattactctgggctcgcgccatcaccagcgactatgtcgtagtgggtaaagctccctcttcggagggagcatcagag

SEQ ID NO: 9626 - DNA, 99 bp, synthetic construct; identical to SEQ ID NO: 9356
  source 1..99: mol_type = other DNA

SEQ ID NO: 9627 - RNA, 90 nt, synthetic construct
  source 1..90: mol_type = other RNA
actggctgcttctatctgattactctgagcgccatcaccagcgactatgtcgtagtgggtaaagctccctcttcggagggagcatcagag

SEQ ID NO: 9628 - RNA, 90 nt, synthetic construct
  source 1..90: mol_type = other RNA
actggcggcttctatctgattactctgagcgccatcaccagcgactatgtcgtagtgggtaaagctccctcttcggagggagcatcagag

SEQ ID NO: 9629 - RNA, 90 nt, synthetic construct
  source 1..90: mol_type = other RNA
actggcggcttctatctgattactctgtgcgccatcaccagcgactatgtcgtagtgggtaaagctccctcttcggagggagcatcagag

SEQ ID NO: 9630 - RNA, 91 nt, synthetic construct
  source 1..91: mol_type = other RNA
actggcggcttctatctgattactctgaggcgccatcaccagcgactatgtcgtagtgggtaaagctccctcttcggagggagcatcagag

SEQ ID NO: 9631 - RNA, 91 nt, synthetic construct
  source 1..91: mol_type = other RNA
actggctgcttctatctgattactctgagccgccatcaccagcgactatgtcgtagtgggtaaagctccctcttcggagggagcatcagag

SEQ ID NO: 9632 - RNA, 91 nt, synthetic construct
  source 1..91: mol_type = other RNA
actggccgcttctatctgattactctgaggcgccatcaccagcgactatgtcgtagtgggtaaagctccctcttcggagggagcatcagag

SEQ ID NO: 9633 - RNA, 90 nt, synthetic construct; identical to SEQ ID NO: 9357
  source 1..90: mol_type = other RNA

SEQ ID NO: 9634 - RNA, 90 nt, synthetic construct
  source 1..90: mol_type = other RNA
actggcgcttctatctgattactctgagtcgccatcaccagcgactatgtcgtagtgggtaaagctccctcttcggagggagcatcagag

SEQ ID NO: 9635 - RNA, 91 nt, synthetic construct
  source 1..91: mol_type = other RNA
actggcgggttctatctgattactctgagccgccatcaccagcgactatgtcgtagtgggtaaagctccctcttcggagggagcatcagag

SEQ ID NO: 9636 - RNA, 90 nt, synthetic construct
  source 1..90: mol_type = other RNA
actggccgcttctatctgattactctgagcgccatcaccagcgactatgtcgtagtgggtaaagctccctcttcggagggagcatcagag

SEQ ID NO: 9637 - RNA, 90 nt, synthetic construct
  source 1..90: mol_type = other RNA
actggtggcttctatctgattactctgagcgccatcaccagcgactatgtcgtagtgggtaaagctccctcttcggagggagcatcagag

SEQ ID NO: 9638 - RNA, 90 nt, synthetic construct
  source 1..90: mol_type = other RNA
actggcgggttctatctgattactctgagcgccatcaccagcgactatgtcgtagtgggtaaagctccctcttcggagggagcatcagag

SEQ ID NO: 9639 - RNA, 91 nt, synthetic construct
  source 1..91: mol_type = other RNA
actggcggcttctatctgattactctgggccgccatcaccagcgactatgtcgtagtgggtaaagctccctcttcggagggagcatcagag

SEQ ID NO: 9640 - RNA, 95 nt, synthetic construct
  source 1..95: mol_type = other RNA
acctgtaggcttctatctgattactctgctacagcgccatcaccagcgactatgtcgtagtgggtaaagctccctcttcggagggagcatcagag

SEQ ID NO: 9641 - RNA, 95 nt, synthetic construct
  source 1..95: mol_type = other RNA
accagcaagcttctatctgattactctgttgctgcgccatcaccagcgactatgtcgtagtgggtaaagctccctcttcggagggagcatcagag

SEQ ID NO: 9642 - RNA, 95 nt, synthetic construct
  source 1..95: mol_type = other RNA
accgagacgcttctatctgattactctgggctcgcgccatcaccagcgactatgtcgtagtgggtaaagctccctcttcggagggagcatcagag

SEQ ID NO: 9643 - RNA, 99 nt, synthetic construct; identical to SEQ ID NO: 9358
  source 1..99: mol_type = other RNA

SEQ ID NO: 9644 - DNA, 20 bp, synthetic construct
  source 1..20: mol_type = other DNA
gtgtagtacaagagatagaa

SEQ ID NO: 9645 - DNA, 20 bp, synthetic construct
  source 1..20: mol_type = other DNA
cccccactgaaaaagatgag

SEQ ID NO: 9646 - DNA, 20 bp, synthetic construct
  source 1..20: mol_type = other DNA
aggccagaaagagagagtag

SEQ ID NO: 9647 - DNA, 20 bp, synthetic construct
  source 1..20: mol_type = other DNA
cgctggatagcctccaggcc

SEQ ID NO: 9648 - DNA, 20 bp, synthetic construct
  source 1..20: mol_type = other DNA
tgaagctgacagcattcggg
